(19) United States
(12) Patent Application Publication
(10) Pub. No.: US 2011/0142917 A1
(43) Pub. Date: Jun. 16, 2011

(54) COMPOSITIONS AND METHODS FOR TREATMENT OF EAR DISORDERS

(76) Inventors: Egvenia Alpert, Jerusalem (IL); Igor Spivak, Jaifa (IL); Amir Bar-Ilan, Haifa (IL)

(21) Appl. No.: 12/994,725

(22) PCT Filed: Jun. 7, 2009
(86) PCT No.: PCT/IL2009/000570

§ 371 Date: Feb. 25, 2011

Related U.S. Application Data
(60) Provisional application No. 61/131,162, filed on Jun. 6, 2008.

(51) Int. Cl. A61K 31/713; A61K 31/7088; A61K 9/127; A61K 33/24; A61P 27/16

(52) U.S. Cl. 424/450; 514/44 R; 514/44 A; 424/649

(57) ABSTRACT

The present invention relates to pharmaceutical compositions useful for topical, non-invasive delivery of an oligonucleotide to the ear and to methods for the treatment of an ear disorder, including hearing loss arising from chemical-induced ototoxicity, acoustic trauma and presbycusis; and microbial infections. The method comprises topically administering to the ear of a subject in need thereof a pharmaceutical composition comprising an inhibitory oligonucleotide, a permeability enhancer and a pharmaceutically acceptable carrier, wherein the oligonucleotide reduces or inhibits expression of a gene associated with the ear disorder in the subject.

### FIELD OF THE INVENTION

[0001] The present invention relates to otic compositions and methods for delivery of an oligonucleotide compound, including siRNA, to the middle and inner ear useful in the treatment of an ear disorder, including hearing loss resulting from chemical-induced ototoxicity, acoustic trauma and presbycusis; tumors and microbial infections.

### BACKGROUND OF THE INVENTION

### The Human Ear

[0002] The ear is comprised of three major structural components: the outer, middle, and inner ears, which function together to convert sound waves into nerve impulses that travel to the brain, where they are perceived as sound. The inner ear also helps to maintain balance.

[0003] The anatomy of the middle and the inner ear is well known to those of ordinary skill in the art (see, e.g., Atlas of Sensory Organs: Functional and Clinical Analysis, Andrs Csillag, Humana Press (2005), pages 1-82, incorporated herein by reference). In brief, the middle ear consists of the eardrum and a small air-filled chamber containing a sequence of three tiny bones known as the ossicles, which link the eardrum to the inner ear.

[0004] The inner ear (labyrinth) is a complex structure consisting of the cochlea, which is the organ of hearing and the vestibular system, the organ of balance. The vestibular system consists of the saccule and the utricle, which determine position sense, and the semicircular canals, which help maintain balance.

[0005] The cochlea houses the organ of Corti, which consists, in part, of about 20,000 specialized sensory cells, called “inner ear hair cells” or “hair cells”. These cells have small hairline projections (cilia) that extend into the cochlear fluid. Sound vibrations transmitted from the ossicles in the middle ear to the oval window in the inner ear cause the fluid and cilia to vibrate. Hair cells in different parts of the cochlea vibrate in response to different sound frequencies and convert the vibrations into nerve impulses which are sent to the brain for processing and interpretation. The inner ear hair cells are surrounded by inner ear support cells. Supporting cells underlie, at least partially surround, and physically support sensory hair cells within the inner ear. Representative examples of support cells include inner rod (pillar cells), outer rod (pillar cells), inner phalangeal cells, outer phalangeal cells (of Deiters), cells of Held, cells of Hensen, cells of Claudius, cells of Boettcher, interdental cells and auditory teeth (of Huschke).

[0006] The spiral ganglion is the group of nerve cells that send a representation of sound from the cochlea to the brain. The cell bodies of the spiral ganglion neurons are found in the spiral structure of the cochlea and are part of the central nervous system. Their dendrites make synaptic contact with the base of hair cells, and their axons are bundled together to form the auditory portion of the eighth cranial nerve (vestibulocochlear nerve).

### Hearing Loss

[0007] Despite the protective effect of the acoustic reflex, loud noise can damage and destroy hair cells. Irreversible hair cell death is elicited by metabolic or biochemical changes in the hair cells that involve reactive oxygen species (ROS). Exposure to certain drugs and continued exposure to loud noise, inter alia, cause progressive damage, eventually resulting in ringing in the ears (tinnitus) and or hearing loss.

[0008] Acquired hearing loss can be caused by several factors including exposure to harmful noise levels, exposure to ototoxic drugs such as cisplatin and aminoglycoside antibiotics and aging.

[0009] International Patent Publication No. WO 2008/050329 to the assignee of the present invention relates to siRNA compounds, compositions comprising same and to methods of use thereof for treating diseases and disorders related to expression of proapoptotic genes. U.S. Ser. No. 11/655,610 to the assignee of the present invention relates to methods of treating hearing impairment by inhibiting a pro-apoptotic gene in general and p53 in particular. International Patent Publication No. WO 2005/119251 relates to methods of treating deafness. International Patent Publication No. WO/2005/055921 relates to foam compositions for treatment of ear disorders. U.S. Pat. No. 7,087,581 relates to methods of treating diseases and disorders of the inner ear.

[0010] There remains a genuine need for easy to use, high compliance pharmaceutical therapies, which effect, inter alia, otoprotection, chemoprotection and hearing regeneration.

### SUMMARY OF THE INVENTION

[0011] The present invention provides pharmaceutical compositions and methods useful in treating an ear disorder, including middle ear and inner ear disorders. The present invention overcomes certain of the limitations in the prior art by providing a non-invasive method of treating an ear disorder comprising topically administering an oligonucleotide to a target gene, wherein the inhibitory oligonucleotide is formulated for topical, non-invasive application. This method is surprising in view of the size of an oligonucleotide and in view of the use of transtympanic injection for delivery of oligonucleotides heretofore. This method also overcomes the limitations associated with use of oral therapeutics, which are often associated with adverse systemic side effects.

[0012] According to one aspect, the present invention provides a method of treating a subject suffering from or at risk of an ear disorder which comprises topically administering to the canal of the subject's ear a pharmaceutical composition comprising an oligonucleotide inhibitor, a permeability enhancer and a pharmaceutically acceptable excipient or mixtures thereof, thereby reducing expression of a gene associated with the disorder in the ear of the subject in an amount effective to treat the subject.

[0013] In various embodiments the permeability enhancer is a polyol. In some embodiments the oligonucleotide is in admixture with a polyol. In some embodiments the polyol is selected from glycerol, propylene glycol, polyethylene glycol, sorbitol, xylitol, or maltitol. According to one embodiment the polyol is glycerol. In various embodiments glycerol is present at a final concentration of about 0.1% to about 35%; about 1% to about 30%; about 5% to about 25%, preferably about 10% to about 20%. In some embodiments the final concentration of glycerol in the pharmaceutical composition is about 2.5%, 5%, 10%, 12.5%, 15%, 17.5%, 20%, 22.5%, 25%, 27.5% or about 30%. In one preferred embodiment, the final concentration of glycerol in the pharmaceutical composition is about 10%. In some embodiments the pharmaceutical composition is brought to the subject's body temperature, which is about 35° C.-38° C., prior to application to the ear.

[0014] In some embodiments, the pharmaceutical composition is applied to the ear canal when the subject's head is tilted to one side and the treated ear is facing upward. In some embodiments, the pharmaceutical composition is applied to the ear using a receptacle for eardrops, for example using a dropper of for example, 10-100 microliter per drop, or a wick.

[0015] In some embodiments an ear disorder relates to chemical-induced hearing loss; for example hearing loss induced by inter alia cisplatin and its analogs; aminoglycoside antibiotics, quinine and its analogs; salicylate and its analogs; phosphodiesterase type 5 (PDE5) inhibitors or loop-diuretics. In some embodiments the ear disorder refers to noise-induced hearing loss. In other embodiments the ear disorder is age related hearing loss.

[0016] In various embodiments the pharmaceutical composition is formulated as eardrops, ear cream, ear ointment, ear foam or mousse. In certain preferred embodiments the pharmaceutical composition is formulated as eardrops. In some embodiments the method comprising unilateral administration of an oligonucleotide to a subject's ear.

[0017] In some embodiments the oligonucleotide is an inhibitory nucleic acid compound selected from the group consisting of an antisense, a siRNA, a shRNA, an aptamer, a ribozyme, a dsRNA or DNA compound. In various preferred embodiment the oligonucleotide is siRNA.

[0018] In another embodiment the oligonucleotide comprises a sufficient number of consecutive nucleotides having a sequence of sufficient homology to a nucleic acid sequence present within a target gene to reduce or inhibit expression of the gene in the subject. In certain embodiments the siRNA is chemically synthesized and chemically modified. The modifications comprise base modifications, sugar modifications, internucleotide linkage modifications or combinations thereof.

[0019] In one embodiment the method and composition for the present invention utilize a siRNA compound having the following structure:

| | |
|---|---|
| 5′ (N)ₓ-Z 3′ | (antisense strand) |
| 3′ Z′-(N′)_{y}-z″ 5′ | (sense strand) |

wherein each of N and N′ is a ribonucleotide which may be unmodified or modified, or an unconventional moiety;
wherein each of (N)x and (N′)y is an oligonucleotide in which each consecutive N or N′ is joined to the next N or N′ by a covalent bond;
[0020] wherein Z and Z′ may be present or absent, but if present is independently 1-5 consecutive nucleotides covalently attached at the 3′ terminus of the strand in which it is present;
[0021] wherein 1′ may be present or absent, but if present is a capping moiety covalently attached at the 5′ terminus of (N′)y;
[0022] wherein each of x and y is independently an integer between 18 and 40:
[0023] wherein the sequence of (N′)y is substantially complementary to the sequence of (N)x; and wherein (N)x comprises an antisense sequence (N)ₓ comprises an antisense sequence substantially complementary to from about 18 to about 40 consecutive ribonucleotides in an mRNA of a target gene associated with an ear disorder.

[0024] In various embodiments (N)x comprises 2′-O-methyl (2′OMe) modified and unmodified ribonucleotides, wherein N at the 3′ terminus of (N)x is a 2′OMe modified ribonucleotide, (N)x comprises at least five alternating 2′OMe modified ribonucleotides beginning at the 3′ end and at least nine 2′OMe modified ribonucleotides in total and each remaining N is an unmodified ribonucleotide and (N′)y comprises at least one mirror nucleotide, or a nucleotide joined to an adjacent nucleotide by a 2′-5′ internucleotide phosphate bond.

[0025] In additional embodiments (N)x comprises modified ribonucleotides in alternating positions wherein each N at the 5′ and 3′ termini are modified in their sugar residues and the middle ribonucleotide is not modified, e.g. ribonucleotide in position 10 in a 19-mer strand. In various embodiments in (N)x and (N′)y the nucleotides alternate between 2′OMe sugar modified ribonucleotides and unmodified ribonucleotides. In some embodiments the ribonucleotide located at the middle position of (N)x is unmodified and the ribonucleotide located at the middle position of (N′)y is 2′OMe sugar modified.

[0026] For all the structures, in some embodiments the covalent bond joining each consecutive N or N′ is a phosphodiester bond. In various embodiments all the covalent bonds are phosphodiester bonds.

[0027] In various embodiments x=y and each of x and y is 19, 20, 21, 22 or 23. In some embodiments x=y=21. In other embodiments x=y=19.

[0028] In one embodiment of the above structure, (N′)y comprises at least one mirror nucleotide at one terminus or both termini or in a penultimate position. In various embodiments (N′)y comprises one mirror nucleotide at the 3′ penultimate position. In one preferred embodiment x=y=19 and (N′)y comprises an L-deoxyribonucleotide at position 18. In one embodiment, a siRNA compound of the invention inhibits the expression of a target gene selected from a viral gene, a bacterial gene and a mammalian gene associated with a disorder in the inner ear of a subject. In some embodiments the target gene is a mammalian gene wherein the gi number of the mRNA of the target gene is set forth in Table 1.

[0029] In certain embodiments the target gene is selected from one or more of the group consisting of: TP53BP2 (ASPP2), BNIP3, CASP2, NOX3, HRK, RAC1, DDIT4 (REDD1), DDIT4L (REDD2), NOX4, HTRA2, CAPNS1 (Calpain), ID3, HES1, HES5, and CDKN1B (p27KIP).

[0030] For convenience and without wishing to be bound to theory the target genes are classified into two groups: Group I target genes relate to otoprotection and include TP53BP2 (ASPP2), BNIP3, CASP2, NOX3, HRK, RAC1, DDIT4 (REDD1), DDIT4L (REDD2), NOX4. HTRA2, CAPNS1 (Calpain), ID3 and Group II target genes relate to cellular regeneration and proliferation and include ID3. HES1, HES5, and CDKN1B (p27KIP).

[0031] According to various embodiments, the method of the present invention provides for inhibiting more than one target gene associated with the ear disorder using one or more oligonucleotides of the invention.

[0032] Accordingly, in one embodiment, the method of the invention is directed treating a subject suffering from an ear disorder by inhibiting two or more target genes designated herein as Group I target genes. In a non-limiting example a siRNA compound to each of the following target genes is administered to a subject: at least one of TP53BP2 (ASPP2), CASP2 and HTRA2, optionally in combination with CAPNS1 (Calpain), optionally in combination with at least one of NOX3, NOX4 and RAC1, optionally in combination with at least one of DDIT4, DDIT4L and ID3, and optionally in combination with at least one of HRK and BNIP3. Without being bound by theory, inhibition of at least one these target genes is associated with the protection against ototoxin-induced hearing loss.

[0033] In another embodiment, the method of the invention is directed to treating a subject suffering from an ear disorder by inhibiting two or more target genes designated herein as Group II: at least one of CDKN1B and ID3, optionally in combination with at least one of HES1 and HES5. Without being bound by theory, the inhibition of at least one of these target genes is associated with the promotion of proliferation of supporting cells or outer or inner hair cells in the cochlea.

[0034] In a preferred embodiment, the method comprises administering the oligonucleotides directed against at least one of CDKN1B and ID3 prior to administering the oligonucleotides directed against at least one of HES1 and HES5. In another embodiment, all oligonucleotides are administered together.

[0035] In a further embodiment, an oligonucleotide directed against a target gene in one group is administered sequentially to an oligonucleotide directed against a target gene in the other group. For example, a siRNA that targets a group I gene is administered to a subject before administration of a siRNA that targets a group II gene. In another embodiment, a siRNA directed against a group I gene is administered to a subject together with a siRNA directed against a group II gene. In various embodiments the target gene is a mammalian gene. In certain embodiments the mammalian gene is a human gene wherein the gi number for the mRNA of the human gene is set forth in Table 1.

[0036] In a second aspect the present invention provides an otic pharmaceutical composition comprising: (a) a therapeutically effective amount of at least one an oligonucleotide molecule compound which inhibits the expression of a human target gene associated with an ear disorder in the inner ear or middle ear (b) a permeability enhancer; and (c) at least one pharmaceutically acceptable excipient or carrier, or mixtures thereof. In some embodiments the permeability enhancer is a polyol selected from the group consisting of glycerol, propylene glycol, sorbitol, xylitol and maltitol.

[0037] In preferred embodiments the polyol is glycerol. In various embodiments glycerol is present at a final concentration of about 0.1% to about 35%; about 1% to about 30%; about 5% to about 25%, about 7% to about 15%, preferably about 10% to about 20%. In some embodiments the final concentration of glycerol in the pharmaceutical composition is about 2.5%, 5%, 10%, 12.5%, 15%, 17.5%, 20%, 22.5%, 25%, 27.5% or about 30%. In one preferred embodiment, the final concentration of glycerol in the pharmaceutical composition is about 10%.

[0038] In some embodiments the composition is formulated for non-invasive application to the human ear, preferably to the ear canal. In various embodiments the composition is formulated as a cream, a foam, a mousse, a paste, an ointment, an emulsion, a solution, a gel, a spray, a suspension, a microemulsion, microspheres, microcapsules, nanospheres, nanoparticles, lipid vesicles, liposomes, polymeric vesicles, patches, a biological insert.

[0039] In various embodiments the pharmaceutical composition is formulated as liquid eardrops, ear cream, ear ointment, ear foam or mousse. In preferred embodiments the pharmaceutical composition is formulated as liquid eardrops.

[0040] In some embodiments the oligonucleotide is an inhibitory nucleic acid compound selected from the group consisting of an antisense, an unmodified siRNA, a chemically modified siRNA, an shRNA, an aptamer, a ribozyme, a dsRNA or DNA compound. In various preferred embodiment the oligonucleotide is siRNA.

[0041] In various embodiments the siRNA is chemically modified to increase stability, increase activity, reduce off target effects, and or to reduce innate immune stimulation. The concentration of siRNA in the composition is between 0.1 mg/ml to 100 mg/ml, preferably between 1 mg/ml to 100 mg/ml, and more preferably between 5 mg/ml to 20 mg/ml.

[0042] In a preferred embodiment, the target gene is selected from one or more of: TP53BP2 (ASPP2), BNIP3, CASP2, NOX3, HRK, RAC1, DDIT4, DDIT4L, NOX4, HTRA2, CAPNS1 (Calpain), ID3, HES1, HES5, CDKN1B and ID3.

[0043] In some embodiments the oligonucleotide reduces or inhibits expression of a gene associated with a middle ear disorder or an inner ear disorder.

[0044] In some embodiments the pharmaceutical composition according to the present invention comprises a chemically modified siRNA compound comprising one of Structures (A)-(P) disclosed herein.

### BRIEF DESCRIPTION OF THE FIGURES

[0045] FIG. 1. Cy3 labelled DDIT4 siRNA in spiral ganglion (ganglion of Corti) in the apical turn of the organ of Corti, 3 days after application of eardrops.

[0046] FIG. 2. Shows Cy3 labelled DDIT4 siRNA in three rows of outer hear cells, inner hear cells and supporting cells in all, basic, second and apical turns of organ of Corti.

[0047] FIG. 3. Shows fluorescence in all parts of the auditory epithelium of dissected rat cochlea 3 days post administration of eardrops (perfused and non perfused).

[0048] FIG. 4. provides Tables A1-A7 which set forth antisense and sense sequences useful in the preparation of siRNA compounds to certain target genes useful in practicing the present invention.

### DETAILED DESCRIPTION OF THE PRESENT INVENTION

[0049] The present invention relates in general to compositions and to methods useful in the treatment if middle and inner ear disorders.

[0050] Methods, molecules and compositions, which inhibit the genes of the invention, are discussed herein at length, and any of said molecules and/or compositions may be beneficially employed in the treatment of a subject suffering from any of said conditions.

[0051] The inhibitory nucleic acids of the present invention are preferably siRNA compounds that possess modifications which may increase activity, increase stability, and/or minimize toxicity when compared to the unmodified compound. These compounds, when admixed with a pharmaceutical vehicle that effects delivery of the nucleic acid to the middle and inner ear, provide effective, safe and patient compliant therapeutic compounds useful in treating a variety of ear disorders. The compounds are designed to prevent or attenuate target gene expression associated with the ear disorder. In certain embodiment the target gene is transcribed into any one of the mRNA polynucleotides set forth in Table 1. In a preferred embodiment, the target gene is selected from one or more of: TP53BP2 (ASPP2), BNIP3, CASP2, NOX3, HRK, RAC1, DDIT4, DDIT4L, NOX4, HTRA2, CAPNS1 (Calpain), ID3, HES1, HES5, CDKN1B.

[0052] Without wishing to be bound to theory the target genes are classified in two groups, group I directed to genes associated with otoprotection and include TP53BP2 (ASPP2), BNIP3, CASP2, NOX3, HRK, RAC1, DDIT4, DD1T4L, NOX4, HTRA2, CAPNS1 (Calpain), ID3, and group II associated with regeneration in cells of the inner ear and include ID3, HES1, HES5, CDKN1B. For some of the genes there is no clear group delineation and the grouping is provided for convenience only.

[0053] Details of several target genes are presented in Table 1, hereinbelow. This list is intended to be representative and non-limiting.

TABLE 1
Non-limiting example of human target genes for treating hearing loss

| No. | Gene | Full name and Human Gene ID |
|---|---|---|
| 1 | TP53BP2 | tumor protein p53 binding protein, 2 |
| | | gi\|112799848\|ref\|NM_001031685.2 (SEQ ID NO: 1) |
| | | gi\|112799845\|ref\|NM_005426.2 (SEQ ID NO: 2) |
| 2 | LRDD | leucine-rich repeats and death domain containing |
| | | gi\|61742781\|ref\|NM_018494.3 (SEQ ID NO: 3) |
| | | gi\|61742783\|ref\|NM_145886.2 (SEQ ID NO: 4) |
| | | gi\|61742785\|ref\|NM_145887.2 (SEQ ID NO: 5) |
| 3 | CYBA | cytochrome b-245. alpha polypeptide |
| | | gi\|68509913\|ref\|NM_000101.2\| (SEQ. ID NO: 6) |
| 4 | p53 | tumor protein p53 |
| | | gi8400737, NM_000546.2 (SEQ ID NO: 7) |
| 5 | CASP2 | caspase 2, apoptosis-related cysteine peptidase |
| | | gi\|39995058\|ref\|NM_032982.2 (SEQ ID NO: 8) |
| | | gi\|39995060\|ref\|NM_032983.2 (SEQ ID NO: 9) |
| 6 | NOX3 | NADPH oxidase 3 |
| | | gi\|11136625\|ref\|NM_015718.1 (SEQ ID NO: 10) |
| 7 | HRK | harakiri |
| | | gi\|4504492\|ref\|NM_003806.1 (SEQ ID NO: 11) |
| 8 | CAPNS1 | Calpain small subunit 1 |
| | | gi\|51599152\|ref\|NM_001749.2\| (SEQ ID NO: 12) |
| | | gi\|51599150\|ref\|NM_001003962.1\| (SEQ ID NO: 13) |
| 9 | RTP801 | Redd1; DNA-damage-inducible transcript 4 |
| | | gi\|56676369\|ref\|NM_019058.2\| (SEQ ID NO: 14) |
| 10 | RTP801L | Redd2; DNA-damage-inducible transcript 4-like |
| | | gi\|34222182\|ref\|NM_145244.2\| (SEQ ID NO: 15) |
| 11 | Notch1 | Notch homolog 1, translocation-associated (Drosophila) |
| | | gi\|148833507\|ref\|NM_017617.3\| (SEQ ID NO: 16) |
| 12 | Rac1 | ras-related C3 botulinum toxin substrate 1 |
| | | (rho family, small GTP binding protein) |
| | | gi\|38505164\|ref\|NM_198829.1 (SEQ ID NO: 17) |
| | | gi\|156071511\|ref\|NM_018890.3 (SEQ ID NO: 18) |
| | | gi\|156071503\|ref\|NM_006908.4 (SEQ ID NO: 19) |
| 13 | HES1 | hairy and enhancer of split 1, (Drosophila) |
| | | gi\|8400709\|ref\|NM__005524.2\| (SEQ ID NO: 20) |
| 14 | HES5 | hairy and enhancer of split 5 (Drosophila) |
| | | gi\|145301612\|ref\|NM_001010926.2\| (SEQ ID NO: 21) |
| 15 | ID1 | inhibitor of DNA binding 1, dominant negative |
| | | helix-loop-helix protein |
| | | gi\|31317298\|ref\|NM_002165.2\| transcript variant 1 (SEQ ID NO: 22) |
| | | gi\|31317296\|ref\|NM_181353.1\| transcript variant 2 (SEQ ID NO: 23) |
| 16 | ID2 | inhibitor of DNA binding 2, dominant negative helix-loop-helix |
| | | protein gi\|33946335\|ref\|NM_002166.4\| (SEQ ID NO:24) |
| 17 | ID3 | inhibitor of DNA binding 3, dominant negative helix-loop-helix |
| | | protein gi\|156119620\|ref\|NM_002167.3\| (SEQ ID NO: 25) |
| 18 | CDKN1B | cyclin-dependent kinase inhibitor 1B (p27, Kip1) |
| | | gi\|17978497\|ref\|NM_004064.2\| (SEQ ID NO: 26) |
| 19 | CDKN2A | cyclin-dependent kinase inhibitor 2A (melanoma, p16, inhibits CDK4) |
| | | gi\|47132605\|ref\|NM_058195.2\| transcript variant 4 (SEQ ID NO: 27) |
| | | gi\|98985803\|ref\|NM_058197.3\| transcript variant 3 (SEQ ID NO: 28) |
| | | gi\|47132606\|ref\|NM_000077.3\| transcript variant 1 (SEQ ID NO: 29) |
| 20 | HTRA2 | Htra serine peptidase 2 |
| | | var 1 gi:73747817\|ref\|NM_013247 (SEQ ID NO: 30) |
| | | var 2 gi:73747818\|ref\|NM_145074 (SEQ ID NO: 31) |
| 21 | KEAP1 | Kelch-like ECH-associated protein 1 |
| | | var 1 gi:45269144\|ref\|NM_203500 (SEQ ID NO: 32) |
| | | var 2 gi:45269143\|ref\|NM_012289 (SEQ ID NO: 33) |
| 22 | SHC1 | Src homology 2 domain containing) transforming prot. 1 |
| | | var 1 gi:52693920\|ref\|NM_183001 (SEQ ID NO: 34) |
| | | var 2 gi:34147725\|ref\|NM_003029 (SEQ ID NO: 35) |
| 23 | ZNHIT1 | Zn finger HIT type 1 |
| | | gi:37594439\|ref\|NM_006349 (SEQ ID NO: 36) |

[0054] Table 1 provides the gi (GeneInfo identifier) and accession numbers for polynucleotide sequences of the mRNA for certain target genes set forth above.

### Ear Disorders

[0055] The present invention is directed to compositions and methods useful in treating a patient suffering from or at risk of various ear disorders. Ear disorders include hearing loss induced for example by ototoxins, excessive noise or ageing. Middle and inner ear disorders produce many of the same symptoms, and a disorder of the middle ear may affect the inner ear and vice versa.

[0056] In addition to hearing loss, ear disorders include Myringitis, an eardrum infection caused by a variety of viruses and bacteria; Temporal bone fracture for example due to a blow to the head; Auditory nerve tumors (acoustic neuroma, acoustic neurinoma, vestibular schwannoma, eighth nerve tumor).

[0057] In various embodiments, the methods and compositions of the invention are useful in treating various conditions of hearing loss. Without being bound by theory, the hearing loss may be due to apoptotic inner ear hair cell damage or loss (Zhang et al., Neuroscience 2003. 120:191-205; Wang et al., J. Neuroscience 23((24):8596-8607), wherein the damage or loss is caused by infection, mechanical injury, loud sound (noise), aging (presbycusis), or chemical-induced ototoxicity.

[0058] By “ototoxin” in the context of the present invention is meant a substance that through its chemical action injures, impairs or inhibits the activity of the sound receptors component of the nervous system related to hearing, which in turn impairs hearing (and/or balance). In the context of the present invention, ototoxicity includes a deleterious effect on the inner ear hair cells. Ototoxins include therapeutic drugs including antineoplastic agents, salicylates, loop-diuretics, quinines, and aminoglycoside antibiotics, contaminants in foods or medicinals, and environmental or industrial pollutants. Typically, treatment is performed to prevent or reduce ototoxicity, especially resulting from or expected to result from administration of therapeutic drugs. Preferably a composition comprising therapeutically effective amount of a chemically modified siRNA compound of the invention is given immediately after the exposure to prevent or reduce the ototoxic effect. More preferably, treatment is provided prophylactically, either by administration of the pharmaceutical composition of the invention prior to or concomitantly with the ototoxic pharmaceutical or the exposure to the ototoxin.

[0059] Incorporated herein by reference are chapters 196, 197, 198 and 199 of The Merck Manual of Diagnosis and Therapy, 14th Edition, (1982), Merck Sharp & Dome Research Laboratories, N.J. and corresponding chapters in the most recent 16th edition, including Chapters 207 and 210) relating to description and diagnosis of hearing and balance impairments.

[0060] Accordingly, in one aspect the present invention provides a method and pharmaceutical compositions for treating a mammal, preferably human, to prevent, reduce, or treat a hearing impairment, disorder or imbalance, preferably an ototoxin-induced hearing condition, by administering to a mammal in need of such treatment a chemically modified siRNA compound of the invention. One embodiment of the invention is a method for treating a hearing disorder or impairment wherein the ototoxicity results from administration of a therapeutically effective amount of an ototoxic pharmaceutical drug. Typical ototoxic drugs are chemotherapeutic agents, e.g. antineoplastic agents, and antibiotics. Other possible candidates include loop-diuretics, quinines or a quinine-like compound, PDE-5 inhibitors and salicylate or salicylate-like compounds.

[0061] Ototoxicity is a dose-limiting side effect of antibiotic administration. From 4 to 15% of patients receiving 1 gram per day for greater than 1 week develop measurable hearing loss, which slowly becomes worse and can lead to complete permanent deafness if treatment continues. Ototoxic aminoglycoside antibiotics include but are not limited to neomycin, paromomycin, ribostamycin, lividomycin, kanamycin, amikacin, tobramycin, viomycin, gentamicin, sisomicin, netilmicin, streptomycin, dibekacin, fortimicin, and dihydrostreptomycin, or combinations thereof. Particular antibiotics include neomycin B, kanamycin A, kanamycin B, gentamicin C1, gentamicin C1a, and gentamicin C2, and the like that are known to have serious toxicity, particularly ototoxicity and nephrotoxicity, which reduce the usefulness of such antimicrobial agents (see Goodman and Gilman's The Pharmacological Basis of Therapeutics, 6th ed., A. Goodman Gilman et al., eds; Macmillan Publishing Co., Inc., New York, pp. 1169-71 (1980)).

[0062] Ototoxicity is also a serious dose-limiting side-effect for anti-cancer agents. Ototoxic neoplastic agents include but are not limited to vincristine, vinblastine, cisplatin and cisplatin-like compounds and taxol and taxol-like compounds. Cisplatin-like compounds include carboplatin (Paraplatin®), tetraplatin, oxaliplatin, aroplatin and transplatin inter alia and are platinum based chemotherapeutics.

[0063] Diuretics with known ototoxic side-effect, particularly “loop” diuretics include, without being limited to, furosemide, ethacrylic acid, and mercurials.

[0064] Ototoxic quinines include but are not limited to synthetic substitutes of quinine that are typically used in the treatment of malaria. In some embodiments the hearing disorder is side-effect of inhibitors of type 5 phosphodiesterase (PDE-5), including sildenafil (Viagra®), vardenafil (Levitra®) and tadalafil (Cialis).

[0065] Salicylates, such as aspirin, are the most commonly used therapeutic drugs for their anti-inflammatory, analgesic, anti-pyretic and anti-thrombotic effects. Unfortunately, they too have ototoxic side effects. They often lead to tinnitus (“ringing in the ears”) and temporary hearing loss. Moreover, if the drug is used at high doses for a prolonged time, the hearing impairment can become persistent and irreversible.

[0066] In some embodiments a method is provided for treatment of infection of a mammal by administration of an aminoglycoside antibiotic, the improvement comprising administering a therapeutically effective amount of one or more chemically modified siRNAs compounds which down-regulate expression a target gene, to the subject in need of such treatment to reduce or prevent ototoxin-induced hearing impairment associated with the antibiotic.

[0067] The methods and pharmaceutical and compositions of the present invention are also effective in the treatment of acoustic trauma or mechanical trauma, preferably acoustic or mechanical trauma that leads to inner ear hair cell loss. With more severe exposure, injury can proceed from a loss of adjacent supporting cells to complete disruption of the organ of Corti. Death of the sensory cell can lead to progressive Wallerian degeneration and loss of primary auditory nerve fibers. The methods of the invention are useful in treating acoustic trauma caused by a single exposure to an extremely loud sound, or following long-term exposure to everyday loud sounds above 85 decibels, for treating mechanical inner ear trauma, for example, resulting from the insertion of an electronic device into the inner ear or for preventing or minimizing the damage to inner ear hair cells associated with the operation.

[0068] Another type of hearing loss is presbycusis, which is hearing loss that gradually occurs in most individuals as they age. About 30-35 percent of adults between the ages of 65 and 75 years and 40-50 percent of people 75 and older experience hearing loss. The methods of the invention are useful in preventing, reducing or treating the incidence and/or severity of inner ear disorders and hearing impairments associated with presbycusis.

### DEFINITIONS

[0069] For convenience certain terms employed in the specification, examples and claims are described herein.

[0070] It is to be noted that, as used herein, the singular forms “a”, “an” and “the” include plural forms unless the content clearly dictates otherwise.

[0071] Where aspects or embodiments of the invention are described in terms of Markush groups or other grouping of alternatives, those skilled in the art will recognize that the invention is also thereby described in terms of any individual member or subgroup of members of the group.

[0072] A “polypeptide” refers to an amino acid sequence encoded by any of the above listed genes, including splice variants, isoforms, orthologs, or paralogs and the like.

[0073] An “inhibitor” is a compound which is capable of reducing the expression of a gene or the activity of the product of such gene to an extent sufficient to achieve a desired biological or physiological effect. The term “inhibitor” as used herein refers to one or more of an oligonucleotide or nucleic acid including antisense, siRNA, shRNA, miRNA and ribozyme. Inhibition may also be referred to as down-regulation or, for RNAi, silencing.

[0074] The term “inhibit” as used herein refers to reducing the expression of a gene or the activity of the product of such gene to an extent sufficient to achieve a desired biological or physiological effect. Inhibition may be complete or partial.

[0075] As used herein, the terms “polynucleotide” and “nucleic acid” may be used interchangeably and refer to nucleotide sequences comprising deoxyribonucleic acid (DNA), and ribonucleic acid (RNA). The terms should also be understood to include, as equivalents, analogs of either RNA or DNA made from nucleotide analogs. Throughout this application mRNA sequences are set forth as representing the corresponding genes. The terms “mRNA polynucleotide sequence” and mRNA are used interchangeably.

[0076] “Oligonucleotide” or “oligomer” refers to a single stranded or double stranded deoxyribonucleotide or ribonucleotide sequence or chimera thereof, from about 2 to about 100 nucleotides, preferably about 15 to about 60, or 18 to about 23. Each DNA or RNA nucleotide that makes tip the oligonucleotide may be independently natural or synthetic, and or modified or unmodified. Modifications include changes to the sugar moiety, the base moiety and or the linkages between nucleotides in the oligonucleotide. The oligonucleotides or oligonucleotide compounds of the present invention are single or double stranded compounds comprising deoxyribonucleotides, ribonucleotides, modified deoxyribonucleotides, modified ribonucleotides and combinations thereof.

[0077] “Nucleotide” or “nucleotide monomer” is meant to encompass a deoxyribonucleotide and a ribonucleotide, which may be natural or synthetic, and or modified or unmodified. Modifications include changes and substitutions to the sugar moiety, the base moiety and/or the internucleotide linkages.

[0078] Analogs of, or modifications to, a nucleotide/oligonucleotide are preferably employed with the present invention, provided that said analog or modification does not substantially adversely affect the function of the nucleotide/oligonucleotide. In some embodiments a chemical modification results in an increase in activity or stability or a reduction in of-target effects or induction of innate immune responses. Acceptable modifications include modifications of the sugar moiety, modifications of the base moiety, modifications in the internucleotide linkages and combinations thereof.

[0079] The nucleotides can be selected from naturally occurring or synthetic modified bases. Naturally occurring bases include adenine, guanine, cytosine, thymine and uracil. Modified bases of nucleotides include inosine, xanthine, hypoxanthine, 2-aminoadenine, 6-methyl, 2-propyl and other alkyl adenines, 5-halo uracil, 5-halo cytosine, 6-aza cytosine and 6-aza thymine, pseudo uracil, 4-thiouracil, 8-halo adenine, 8-aminoadenine, 8-thiol adenine, 8-thiolalkyl adenines, 8-hydroxyl adenine and other 8-substituted adenines, 8-halo guanines, 8-amino guanine, 8-thiol guanine, 8-thioalkyl guanines, 8-hydroxyl guanine and other substituted guanines, other aza and deaza adenines, other aza and deaza guanines, 5-trifluoromethyl uracil and 5-trifluoro cytosine.

[0080] In addition, compounds comprising nucleotide analogs prepared wherein the structure of one or more nucleotide is fundamentally altered and better suited as therapeutic or experimental reagents. An example of a nucleotide analog is a peptide nucleic acid (PNA) wherein the deoxyribose (or ribose) phosphate backbone in DNA (or RNA is replaced with a polyamide backbone which is similar to that found in peptides. PNA analogs have been shown to be resistant to enzymatic degradation and to have extended lives in vivo and in vitro.

[0081] Possible modifications to the sugar residue are manifold and include 2′-O alkyl, locked nucleic acid (LNA), glycol nucleic acid (GNA), threose nucleic acid (TNA), arabinoside, altritol (ANA) and other, 6-membered sugars including morpholinos, and cyclohexinyls.

[0082] LNA compounds are disclosed in. International Patent Publication Nos. WO 00/47599, WO 99/14226, and WO 98/39352. Examples of siRNA compounds comprising LNA nucleotides are disclosed in Elmen et al., (NAR 2005. 33(1):439-447) and in International Patent Publication No. WO 2004/083430.

[0083] Backbone modifications, such as ethyl (resulting in a phospho-ethyl triester); propyl (resulting in a phospho-propyl triester); and butyl (resulting in a phospho-butyl triester) are also possible. Other backbone modifications include polymer backbones, cyclic backbones, acyclic backbones, thiophosphate-D-ribose backbones, amidates, phosphonoacetate derivatives. Certain structures include siRNA compounds having one or a plurality of 2′-5′ internucleotide linkages (bridges or backbone).

[0084] Additional modifications which may be present in the molecules of the present invention include nucleoside modifications such as artificial nucleic acids, peptide nucleic acid (PNA), morpholino and locked nucleic acid (LNA), glycol nucleic acid (GNA), threose nucleic acid (TNA), arabinoside, and mirror nucleoside (for example, beta-L-deoxynucleoside instead of beta-D-deoxynucleoside Further, said molecules may additionally contain modifications on the sugar, such as 2′-alkyl, 2′-fluoro (2′-deoxy-2′-fluoro), 2′O-allyl, 2′ amine and 2′ alkoxy. Additional sugar modifications are discussed herein.

[0085] Further, the inhibitory nucleic acid molecules of the present invention may comprise one or more gaps and/or one or more nicks and/or one or more mismatches. Without wishing to be bound by theory, gaps, nicks and mismatches have the advantage of partially destabilizing the nucleic acid/siRNA, so that it may be more easily processed by endogenous cellular machinery such as DICER, DROSHA or RISC into its inhibitory components.

[0086] In the context of the present invention, a gap in a nucleic acid refers to the absence of one or more internal nucleotides in one strand, while a nick in a nucleic acid refers to the absence of an internucleotide linkage between two adjacent nucleotides in one strand. Any of the molecules of the present invention may contain one or more gaps and/or one or more nicks.

siRNAs and RNA Interference

[0087] RNA interference (RNAi) is a phenomenon involving double-stranded (ds) RNA-dependent gene specific posttranscriptional silencing. Originally, attempts to study this phenomenon and to manipulate mammalian cells experimentally were frustrated by an active, non-specific antiviral defense mechanism which was activated in response to long dsRNA molecules (Gil et al. Apoptosis, 2000. 5:107-114). Later it was discovered that synthetic duplexes of 21 nucleotide RNAs could mediate gene specific RNAi in mammalian cells, without the stimulation of the generic antiviral defense mechanisms (see Elbashir et al. Nature 2001, 411:494-498 and Caplen et al. PNAS USA 2001, 98:9742-9747). As a result, small interfering RNAs (siRNAs), which are short double-stranded RNAs, have become powerful tools in attempting to understand gene function. Thus RNA interference (RNAi) refers to the process of sequence-specific post-transcriptional gene silencing in mammals mediated by small interfering RNAs (siRNAs) (Fire et al, Nature 1998. 391, 806) or microRNAs (miRNA; Ambros, Nature 2004 431:7006,350-55; and Bartel, Cell, 2004. 116(2):28′-97). The corresponding process in plants is commonly referred to as specific post transcriptional gene silencing or RNA silencing and is referred to as quelling in fungi.

[0088] A siRNA is a double-stranded RNA molecule which inhibits, either partially or fully, the expression of a gene/mRNA of its endogenous or cellular counterpart, or of an exogenous gene such as a viral nucleic acid. The mechanism of RNA interference is detailed infra.

[0089] Several studies have revealed that siRNA therapeutics are effective in vivo in both mammals and in humans. Bitko et al., have shown that specific siRNA molecules directed against the respiratory syncytial virus (RSV) nucleocapsid N gene are effective in treating mice when administered intranasally (Bitko et al., Nat. Med. 2005, 11(1):50-55). siRNA has recently been successfully used for inhibition in primates (Tolentino et al., Retina 2004. 24(1):132-138). For a review of the use of siRNA as therapeutics, see for example Barik (J. Mol. Med. 2005. 83: 764-773) or Dykxhoorn et al (2006. Gene Ther. 13:541-552).

siRNA Structures

[0090] The selection and synthesis of siRNA corresponding to known genes has been widely reported; (see for example Ui-Tel et al., J Biomed Biotech. 2006; 2006: 65052; Chalk et BBRC. 2004, 319(1): 264-74; Sioud & Leirdal, Met. Mol. Biol.; 2004, 252:457-69; Levenkova et al., Bioinform. 2004, 20(3):430-2; Ui-Tei et al., NAR. 2004, 32(3):936-48).

[0091] For examples of the use of, and production of, modified siRNA see, for example, Braasch et al., Biochem. 2003, 42(26):7967-75; Chiu et al., RNA, 2003, 9(9):1034-48; PCT publications WO 2004/015107 (atugen AG) and WO 02/44321 (Tuschl et al). U.S. Pat. Nos. 5,898,031 and 6,107,094, teach chemically modified oligomers. US Patent Publication Nos. 2005/0080246 and 2005/0042647 relate to oligomeric compounds having an alternating motif and dsRNA compounds having chemically modified internucleoside linkages, respectively.

[0092] Other modifications have been disclosed. The inclusion of a 5′-phosphate moiety was shown to enhance activity of siRNAs in Drosophila embryos (Boutla, et al., Curr. Biol. 2001, 11:1776-1780) and is required for siRNA function in human HeLa cells (Schwarz et al., Mol. Cell, 2002, 10:537-48). Amarzguioui et al., (NAR, 2003, 31(2):589-95) showed that siRNA activity depended on the positioning of the 2′-O-methyl modifications. Holen et al (NAR. 2003, 31(9):2401-07) report that an siRNA having small numbers of 2′-O-methyl modified nucleosides gave good activity compared to wild type but that the activity decreased as the numbers of 2′-O-methyl modified nucleosides was increased. Chiu and Rana (RNA. 2003, 9:1034-48) teach that incorporation of 2′-O-methyl modified nucleosides in the sense or antisense strand (fully modified strands) severely reduced siRNA activity relative to unmodified siRNA. The placement of a 2′-O-methyl group at the 5′-terminus on the antisense strand was reported to severely limit activity whereas placement at the 3′-terminus of the antisense and at both termini of the sense strand was tolerated (Czauderna et al., NAR. 2003, 31(11):2705-16; WO 2004/015107). The molecules of the present invention offer an advantage in that they are non-toxic and may be formulated as pharmaceutical compositions for treatment of various diseases.

[0093] International Patent Publication No. WO 2008/050329 to the assignee of the present invention and hereby incorporated in its entirely relates to siRNA compounds, compositions comprising same and to methods of use thereof for treating diseases and disorders related to expression of proapoptotic genes. U.S. Ser. No. 11/655,610 relates to methods of treating hearing impairment by inhibiting a pro-apoptotic gene in general and p53 in particular. International Patent Publication No. WO 2005/119251 relates to methods of treating deafness. International Patent Publication No. WO/2005/055921 relates to foam compositions for treatment of ear disorders. U.S. Pat. No. 7,087,581 relates to methods of treating diseases and disorders of the inner ear.

[0094] According to one aspect the present invention provides a method for the treatment of ear disorders comprising the step of administering a pharmaceutical composition comprising administering a composition comprising a chemically modified inhibitory oligonucleotide compound; a permeability enhancer and pharmaceutically acceptable carrier. The compound comprises at least one modified nucleotide selected from the group consisting of a sugar modification, a base modification and an internucleotide linkage modification.

[0095] The present invention also relates to compounds which down-regulate expression of various genes, particularly to novel small interfering RNAs (siRNAs), and to the use of these novel siRNAs in the treatment of hearing loss, in the regeneration of inner ear cells and in preventing chemical-induced hearing loss.

[0096] A non-limiting list of human target genes useful in the present invention is provided in Table 1, set forth in SEQ ID NOS 1-36. In a preferred embodiment, the target gene is selected from one or more of: TP53BP2 (ASPP2), BNIP3, CASP2, NOX3, HRK, RAC1, DDIT4, DDIT4L, NOX4, HTRA2, CAPNS1 (Calpain), ID3, HES1, HES5, CDKN1B and ID3. The reference to mRNA associated with those genes is set forth therein. For each gene 19-mer, 21-mer and 23-mer sequences is generated, which are prioritized based on their score in the proprietary algorithm as the best sequences for targeting the human gene expression. The 21- or 23-mer siRNA sequences can also be generated by 5′ and/or 3′ extension of the 19-mer sequences disclosed herein. Such extension is preferably complementary to the corresponding mRNA sequence. Certain 23-mer oligomers were devised by this method where the order of the prioritization is the order of the corresponding 19-mer. The siRNA oligomers useful in practicing the invention are disclosed in Tables B of U.S. Ser. No. 11/978,089, assigned to the assignee of the present invention and which is hereby incorporated by reference in their entirety and are set forth as SEQ ID NOS:97-68654 in that application. Certain siRNA oligomers useful in the compositions and methods of the present invention are disclosed in U.S. Ser. Nos. 11/207,119, 11/811,112, 11/655,636, and International Patent Application Nos. PCT/IL2008/000797, PCT/IL2008/000874, PCT/IL2009/000053, PCT/IL2009/000302, assigned to the assignee of the present invention and which are hereby incorporated by reference in their entirety. Certain 19-mer antisense and sense oligonucleotides sequences useful in the preparation of siRNA compounds of various lengths are shown in FIG. 4. The abbreviations for cross species sequences are as follows: Chp: chimpanzee, Ms: Mouse, Chn: chinchilla; GP: guinea-pig.

[0097] In some embodiments the present invention provides a composition and method comprising a long oligonucleotide, typically about 41-500 nucleotides in length) comprising none or one or more stein and loop structures, which is processed intracellularly by endogenous cellular complexes (e.g. by DROSHA and DICER as described above) to produce one or more smaller double stranded oligonucleotides (siRNAs). In some embodiments the long oligonucleotide is a single stranded oligonucleotide comprising one or more stem and loop structures, wherein each stem region comprises a sense and corresponding antisense siRNA sequence. Any molecules, such as, for example, antisense DNA molecules which comprise the inhibitory sequences disclosed herein (with the appropriate nucleic acid modifications) are particularly desirable and may be used in the same capacity as their corresponding RNAs/siRNAs for all uses and methods disclosed herein.

### Oligonucleotides

[0098] The present invention provides double-stranded oligonucleotides (e.g. siRNAs), which down-regulate the expression of a desired gene. An siRNA of the invention is a duplex oligoribonucleotide in which the sense strand is derived from the mRNA sequence of the desired gene, and the antisense strand is complementary to the sense strand. In general, some deviation from the target mRNA sequence is tolerated without compromising the siRNA activity (see e.g. Czauderna et al., NAR. 2003, 31(11):2705-2716). An siRNA of the invention inhibits gene expression on a post-transcriptional level with or without destroying the mRNA. Without being bound by theory, siRNA may target the mRNA for specific cleavage and degradation and/or may inhibit translation from the targeted message.

[0099] In various embodiments the siRNA comprises an RNA duplex comprising a first strand and a second strand, whereby the first strand comprises a ribonucleotide sequence at least partially complementary to about 18 to about 40 consecutive nucleotides of a target nucleic acid which is mRNA transcribed from a target gene, and the second strand comprises a ribonucleotide sequence at least partially complementary to the first strand and wherein said first strand and or said second strand comprises a one or more chemically modified ribonucleotides and or unconventional moieties.

[0100] In one embodiment the siRNA compound comprises at least one ribonucleotide comprising a 2′ modification on the sugar moiety (“2′ sugar modification”). In certain embodiments the compound comprises 2′O-alkyl or 2′-fluoro or 2′O-allyl or any other 2′ modification, optionally on alternate positions. Other stabilizing modifications are also possible (e.g. terminal modifications). In some embodiments a preferred 2′O-alkyl is 2′O-methyl (methoxy, 2′OMe) sugar modification.

[0101] In some embodiments the backbone of the oligonucleotides is modified and comprises phosphate-D-ribose entities but may also contain thiophosphate-D-ribose entities, triester, thioate, 2′-5′ bridged backbone (also may be referred to as 5′-2′), PACE and the like.

[0102] As used herein, the terms “non-pairing nucleotide analog” means a nucleotide analog which comprises a non-base pairing moiety including but not limited to: 6 des amino adenosine (Nebularine), 4-Me-indole, 3-nitropyrrole, 5-nitroindole, Ds, Pa, N3-Me ribo U, N3-Me riboT, N3-Me dC, N3-Me-dT, N1-Me-dG, NI-Me-dA, N3-ethyl-dC, N3-Me dC. In some embodiments the non-base pairing nucleotide analog is a ribonucleotide. In other embodiments it is a deoxyribonucleotide. In addition, analogues of polynucleotides may be prepared wherein the structure of one or more nucleotide is fundamentally altered and better suited as therapeutic or experimental reagents. An example of a nucleotide analogue is a peptide nucleic acid (PNA) wherein the deoxyribose (or ribose) phosphate backbone in DNA (or RNA is replaced with a polyamide backbone which is similar to that found in peptides. PNA analogues have been shown to be resistant to enzymatic degradation and to enhance stability in vivo and in vitro. Other useful modifications include polymer backbones, cyclic backbones, acyclic backbones, thiophosphate-D-ribose backbones, triester backbones, thioate backbones, 2′-5′ bridged backbone, artificial nucleic acids, morpholino nucleic acids, glycol nucleic acid (GNA), threose nucleic acid (TNA), arabinoside, and mirror nucleoside (for example, beta-L-deoxyribonucleoside instead of beta-D-deoxyribonucleoside). The compounds of the present invention can be synthesized using one or more inverted nucleotides, for example inverted thymidine or inverted adenine (see, for example, Takei, et al., 2002, JBC 277(26):23800-06).

[0103] Additional modifications include terminal modifications on the 5′ and/or 3′ part of the oligonucleotides anti are also known as capping moieties. Such terminal modifications are selected from a nucleotide, a modified nucleotide, a lipid, a peptide, a sugar and inverted abasic moiety.

[0104] What is sometimes referred to in the present invention as an “abasic nucleotide” or “abasic nucleotide analog” is more properly referred to as a pseudo-nucleotide or an unconventional moiety. A nucleotide is a monomeric unit of nucleic acid, consisting of a ribose or deoxyribose sugar, a phosphate, and a base (adenine, guanine, thymine, or cytosine in DNA; adenine, guanine, uracil, or cytosine in RNA). A modified nucleotide comprises a modification in one or more of the sugar, phosphate and or base. The abasic pseudo-nucleotide lacks a base, and thus is not strictly a nucleotide.

[0105] The term “unconventional moiety” as used herein refers to abasic ribose moiety, an abasic deoxyribose moiety, a deoxyribonucleotide, a modified deoxyribonucleotide, a mirror nucleotide, a non-base pairing nucleotide analog and a nucleotide joined to an adjacent nucleotide by a 2′-5′ internucleotide phosphate bond; bridged nucleic acids including LNA and ethylene bridged nucleic acids. In some embodiments of the present invention a preferred unconventional moiety is an abasic ribose moiety, an abasic deoxyribose moiety, a deoxyribonucleotide, a minor nucleotide, and a nucleotide joined to an adjacent nucleotide by a 2′-5′ internucleotide phosphate bond.

[0106] Abasic deoxyribose moiety includes for example abasic deoxyribose-3′-phosphate; 1,2-dideoxy-D-ribofuranose-3-phosphate; L4-anhydro-2-deoxy-D-ribitol-3-phosphate. Inverted abasic deoxyribose moiety includes inverted deoxyriboabasic; 3′,5′ inverted deoxyabasic 5′-phosphate.

[0107] A “mirror” nucleotide is a nucleotide with reversed chirality to the naturally occurring or commonly employed nucleotide, i.e., a minor image (L-nucleotide) of the naturally occurring (D-nucleotide), also referred to as L-RNA in the case of a mirror ribonucleotide, and “spiegelmer”. The nucleotide can be a ribonucleotide or a deoxyribonucleotide and my further comprise at least one sugar, base and or backbone modification. See U.S. Pat. No. 6,586,238. Also, U.S. Pat. No. 6,602,858 discloses nucleic acid catalysts comprising at least one L-nucleotide substitution. Mirror nucleotide includes for example L-DNA (L-deoxyriboadenosine-3′-phosphate (mirror dA); L-deoxyribocytidine-3′-phosphate (mirror dC); L-deoxyriboguanosine-3′-phosphate (mirror dG); L-deoxyribothymidine-3′-phosphate (mirror image dT)) and L-RNA (L-riboadenosine-3′-phosphate (mirror rA); L-ribocytidine-3′-phosphate (mirror rC); L-riboguanosine-3′-phosphate (mirror rG); L-ribouracil-3′-phosphate (mirror dU).

[0108] The term “capping moiety” as used herein includes abasic ribose moiety, abasic deoxyribose moiety, modifications abasic ribose and abasic deoxyribose moieties including 2′ O alkyl modifications; inverted abasic ribose and abasic deoxyribose moieties and modifications thereof; C6-imino-Pi; a mirror nucleotide including L-DNA and L-RNA; 5′O-Me nucleotide; and nucleotide analogs including 4′,5′-methylene nucleotide; 1-(β-D-erythrofuranosyl)nucleotide; 4′-thio nucleotide, carbocyclic nucleotide; 5′-amino-alkyl phosphate; 1,3-diamino-2-propyl phosphate, 3-aminopropyl phosphate; 6-aminohexyl phosphate; 12-aminododecyl phosphate; hydroxypropyl phosphate; 1,5-anhydrohexitol nucleotide; alpha-nucleotide; threo-pentofuranosyl nucleotide; acyclic 3′,4′-seco nucleotide; 3,4-dihydroxybutyl nucleotide; 3,5-dihydroxypentyl nucleotide, 5′-5′-inverted abasic moiety; 1,4-butanediol phosphate; 5′-amino; and bridging or non bridging methylphosphonate and 5′-mercapto moieties.

[0109] Certain preferred capping moieties are abasic ribose or abasic deoxyribose moieties; inverted abasic ribose or abasic deoxyribose moieties; C6-amino-Pi; a mirror nucleotide including L-DNA and L-RNA.

[0110] A further end modification is a biotin group. Such biotin group may preferably be attached to either the most 5′ or the most 3′ nucleotide of the first and/or second strand or to both ends. In a more preferred embodiment the biotin group is coupled to a polypeptide or a protein. It is also within the scope of the present invention that the polypeptide or protein is attached through any of the other aforementioned end modifications. The various end modifications as disclosed herein are preferably located at the ribose moiety of a nucleotide of the nucleic acid according to the present invention. More particularly, the end modification may be attached to or replace any of the OH-groups of the ribose moiety, including but not limited to the 2′OH, 3′OH and 5′OH position, provided that the nucleotide thus modified is a terminal nucleotide. Inverted abasic or abasic are nucleotides, either deoxyribonucleotides or ribonucleotides which do not have a nucleobase moiety (for example see Sternberger, et al., (2002). Antisense Nucleic Acid Drug Dev, 12, 131-43).

[0111] Modified deoxyribonucleotide includes, for example 5′OMe DNA (5-methyl-deoxyriboguanosine-3′-phosphate) which may be useful as a nucleotide in the 5′ terminal position (position number 1); PACE (deoxyriboadenine 3′ phosphonoacetate, deoxyribocytidine 3′ phosphonoacetate, deoxyriboguanosine 3′ phosphonoacetate, deoxyribothymidine 3′ phosphonoacetate.

[0112] Bridged nucleic acids include LNA (2′-O, 4′-C-methylene bridged Nucleic Acid adenosine 3′ monophosphate, 2′-O, 4′-C-methylene bridged Nucleic Acid 5-methyl-cytidine 3′ monophosphate, 2′-O, 4′-C-methylene bridged Nucleic Acid guanosine 3′ monophosphate, 5-methyl-uridine (or thymidine) 3′ monophosphate); and ENA (2′-O, 4′-C-ethylene bridged nucleic acid adenosine 3′ monophosphate, 2′-O, 4′-C-ethylene bridged nucleic acid 5-methyl-cytidine 3′ monophosphate, 2′-O, 4′-C-ethylene bridged nucleic acid guanosine 3′ monophosphate, 5-methyl-uridine (or thymidine) 3′ monophosphate).

[0113] In certain embodiments the complementarity between said first strand and the target nucleic acid is perfect. In some embodiments, the strands are substantially complementary, i.e. having one, two or up to three mismatches between said first strand and the target nucleic acid. Substantially complementary refers to complementarity of greater than about 84%, to another sequence. For example in a duplex region consisting of 19 base pairs one mismatch results in 94.7% complementarity, two mismatches results in about 89.5% complementarity and 3 mismatches results in about 84.2% complementarity, rendering the duplex region substantially complementary. Accordingly substantially identical refers to identity of greater than about 84%, to another sequence.

[0114] In some embodiments the first strand and the second strand of the compound are linked by a loop structure, which is comprised of a non-nucleic acid polymer such as, inter cilia, polyethylene glycol. Alternatively, the loop structure is comprised of a nucleic acid, including modified and non-modified ribonucleotides and modified and non-modified deoxyribonucleotides.

[0115] In further embodiments, the 5′-terminus of the first strand of the siRNA is linked to the 3′-terminus of the second strand, or the 3′-terminus of the first strand is linked to the 5′-terminus of the second strand, said linkage being via a nucleic acid linker typically having a length between 2-100 nucleobases, preferably about 2 to about 30 nucleobases.

[0116] In preferred embodiments of the compounds of the invention having alternating ribonucleotides modified in at least one of the antisense and the sense strands of the compound, for 19 mer and 23 mer oligomers the ribonucleotides at the 5′ and 3′ termini of the antisense strand are modified in their sugar residues, and the ribonucleotides at the 5′ and 3′ termini of the sense strand are unmodified in their sugar residues. For 21 mer oligomers the ribonucleotides at the 5′ and 3′ termini of the sense strand are modified in their sugar residues, and the ribonucleotides at the 5′ and 3′ termini of the antisense strand are unmodified in their sugar residues, or may have an optional additional modification at the 3′ terminus. As mentioned above, it is preferred that the middle nucleotide of the antisense strand is unmodified.

[0117] According to one preferred embodiment of the invention, the antisense and the sense strands of the oligonucleotide/siRNA are phosphorylated at the 3′-terminus and not at the 5′-terminus. According to another preferred embodiment of the invention, the antisense and the sense strands are non-phosphorylated. According to yet another preferred embodiment of the invention, the 5′ most ribonucleotide in the sense strand is modified to abolish any possibility of in vivo 5′-phosphorylation.

[0118] Any siRNA sequence can be prepared having any of the modifications/structures disclosed herein. The compound comprising a combination of sequence plus structure is useful in the treatment of the conditions disclosed herein.

### Structural Motifs

[0119] According to the present invention the siRNA compounds are chemically and or structurally modified according to one of the following modifications set forth in Structures (A)-(P) or as tandem siRNA or RNAstar.

[0120] In one aspect the present invention provides a compound set forth as Structure (A):

| | | |
|---|---|---|
| (A) | 5′ (N)ₓ-Z 3′ | (antisense strand) |
| | 3′ Z′-(N′)_{y} 5′ | (sense strand) |

wherein each of N and N′ is a nucleotide selected from an unmodified ribonucleotide, a modified ribonucleotide, an unmodified deoxyribonucleotide and a modified deoxyribonucleotide;
wherein each of (N)ₓ and (N′)_{y} is an oligonucleotide in which each consecutive N or N′ is joined to the next N or N′ by a covalent bond;
wherein each of x and y is an integer between 18 and 40;
wherein each of Z and Z′ may be present or absent, but if present is 1-5 consecutive nucleotides covalently attached at the 3′ terminus of the strand in which it is present;
wherein the sequence of (N′)_{y} is a sequence substantially complementary to (N)x; and wherein the sequence of (N)ₓ comprises an antisense sequence substantially complementary to from about 18 to about 40 consecutive ribonucleotides in an mRNA of a target gene associated with an ear disorder.

[0121] In certain embodiments the present invention provides a compound having structure (B)

| | | |
|---|---|---|
| (B) | 5′ (N)ₓ-Z 3′ | (antisense strand) |
| | 3′ Z′-(N′)_{y} 5′ | (sense strand) |

wherein each of (N)ₓ and (N′)_{y} is an oligomer in which each consecutive N or N′ is an unmodified ribonucleotide or a modified ribonucleotide joined to the next N or N′ by a covalent bond;
wherein each of Z and Z′ may be present or absent, but if present is 1-5 consecutive nucleotides covalently attached at the 3′ terminus of the strand in which it is present;
wherein each of x and y=19, 21 or 23 and (N)ₓ and (N′)_{y} are fully complementary wherein alternating ribonucleotides in each of (N)ₓ and (N′)_{y} are modified to result in a 2′-O-methyl modification in the sugar residue of the ribonucleotides;
wherein the sequence of (N′)_{y} is a sequence substantially complementary to (N)x; and wherein the sequence of (N)ₓ comprises an antisense sequence substantially complementary to the substantially complementary to from about 18 to about 40 consecutive ribonucleotides in an mRNA of a target gene associated with an ear disorder.

[0122] In some embodiments each of (N)ₓ and (N′)_{y} is independently phosphorylated or non-phosphorylated at the 3′ and 5′ termini.

[0123] In certain embodiments wherein each of x and y=19 or 23, each N at the 5′ and 3′ termini of (N)ₓ is modified; and each N′ at the 5′ and 3′ termini of (N′)_{y} is unmodified.

[0124] In certain embodiments wherein each of x and y=21, each N at the 5′ and 3′ termini of (N)ₓ is unmodified; and each N′ at the 5′ and 3′ termini of (N′)_{y} is modified.

[0125] In particular embodiments, when x and y=19, the siRNA is modified such that a 2′-O-methyl (2′-OMe) group is present on the first, third, fifth, seventh, ninth, eleventh, thirteenth, fifteenth, seventeenth and nineteenth nucleotide of the antisense strand (N)ₓ, and whereby the very same modification, i.e. a 2′-OMe group, is present at the second, fourth, sixth, eighth, tenth, twelfth, fourteenth, sixteenth and eighteenth nucleotide of the sense strand (N′)_{y}. In various embodiments these particular siRNA compounds are blunt ended at both termini.

[0126] In some embodiments, the present invention provides a compound having Structure (C):

| | | |
|---|---|---|
| (C) | 5′ (N)x-Z 3′ | antisense strand |
| | 3′ Z′-(N′)y 5′ | sense strand |

wherein each of N and N′ is a nucleotide independently selected from an unmodified ribonucleotide, a modified ribonucleotide, an unmodified deoxyribonucleotide and a modified deoxyribonucleotide;
wherein each of (N)x and (N′)y is an oligomer in which each consecutive nucleotide is joined to the next nucleotide by a covalent bond and each of x and y is an integer between 18 and 40;
wherein in (N)x the nucleotides are unmodified or (N)x comprises alternating modified ribonucleotides and unmodified ribonucleotides; each modified ribonucleotide being modified so as to have a 2′-O-methyl on its sugar and the ribonucleotide located at the middle position of (N)x being modified or unmodified preferably unmodified;
wherein (N′)y comprises unmodified ribonucleotides further comprising one modified nucleotide at a terminal or penultimate position, wherein the modified nucleotide is selected from the group consisting of a mirror nucleotide, a bicyclic nucleotide, a 2′-sugar modified nucleotide, an altritol nucleotide, or a nucleotide joined to an adjacent nucleotide by an internucleotide linkage selected from a 2′-5′ phosphodiester bond, a P-alkoxy linkage or a PACE linkage;
wherein if more than one nucleotide is modified in (N′)y, the modified nucleotides may be consecutive;
wherein each of Z and Z′ may be present or absent, but if present is 1-5 deoxyribonucleotides covalently attached at the 3′ terminus of any oligomer to which it is attached;
wherein the sequence of (N′)_{y} comprises a sequence substantially complementary to (N)x; and wherein (N)ₓ comprises an antisense sequence substantially complementary to from about 18 to about 40 consecutive ribonucleotides in an mRNA of a target gene associated with an ear disorder.

[0127] In particular embodiments, x=y=19 and in (N)x each modified ribonucleotide is modified so as to have a 2′-O-methyl on its sugar and the ribonucleotide located at the middle of (N)x is unmodified. Accordingly, in a compound wherein x=19, (N)x comprises 2′-β-methyl sugar modified ribonucleotides at positions 1, 3, 5, 7, 9, 11, 13, 15, 17 and 19. In other embodiments, (N)x comprises 2′O Me modified ribonucleotides at positions 2, 4, 6, 8, 11, 13, 15, 17 and 19 and may further comprise at least one abasic or inverted abasic unconventional moiety for example in position 5. In other embodiments, (N)x comprises 2′O Me modified ribonucleotides at positions 2, 4, 8, 11, 13, 15, 17 and 19 and may further comprise at least one abasic or inverted abasic unconventional moiety for example in position 6. In other embodiments, (N)x comprises 2′O Me modified ribonucleotides at positions 2, 4, 6, 8, 11, 13, 17 and 19 and may further comprise at least one abasic or inverted abasic unconventional moiety for example in position 15. In other embodiments, (N)x comprises 2′O Me modified ribonucleotides at positions 2, 4, 6, 8, 11, 13, 15, 17 and 19 and may further comprise at least one abasic or inverted abasic unconventional moiety for example in position 14. In other embodiments, (N)x comprises 2′O Me modified ribonucleotides at positions 1, 2, 3, 7, 9, 11, 13, 15, 17 and 19 and may further comprise at least one abasic or inverted abasic unconventional moiety for example in position 5. In other embodiments, (N)x comprises 2′O Me modified ribonucleotides at positions 1, 2, 3, 5, 7, 9, 11, 13, 15, 17 and 19 and may further comprise at least one abasic or inverted abasic unconventional moiety for example in position 6. In other embodiments, (N)x comprises 2′O Me modified ribonucleotides at positions 1, 2, 3, 5, 7, 9, 11, 13, 17 and 19 and may further comprise at least one abasic or inverted abasic unconventional moiety for example in position 15. In other embodiments, (N)x comprises 2′O Me modified ribonucleotides at positions 1, 2, 3, 5, 7, 9, 11, 13, 15, 17 and 19 and may further comprise at least one abasic or inverted abasic unconventional moiety for example in position 14. In other embodiments, (N)x comprises 2′O Me modified ribonucleotides at positions 2, 4, 6, 7, 9, 11, 13, 15, 17 and 19 and may further comprise at least one abasic or inverted abasic unconventional moiety for example in position 5. In other embodiments, (N)x comprises 2′O Me modified ribonucleotides at positions 1, 2, 4, 6, 7, 9, 11, 13, 15, 17 and 19 and may further comprise at least one abasic or inverted abasic unconventional moiety for example in position 5. In other embodiments, (N)x comprises 2′O Me modified ribonucleotides at positions 2, 4, 6, 8, 11, 13, 14, 16, 17 and 19 and may further comprise at least one abasic or inverted abasic unconventional moiety for example in position 15. In other embodiments, (N)x comprises 2′O Me modified ribonucleotides at positions 1, 2, 3, 5, 7, 9, 11, 13, 14, 16, 17 and 19 and may further comprise at least one abasic or inverted abasic unconventional moiety for example in position 15. In other embodiments, (N)x comprises 2′O Me modified ribonucleotides at positions 2, 4, 6, 8, 11, 13, 15, 17 and 19 and may further comprise at least one abasic or inverted abasic unconventional moiety for example in position 7. In other embodiments, (N)x comprises 2′O Me modified ribonucleotides at positions 2, 4, 6, 11, 13, 15, 17 and 19 and may further comprise at least one abasic or inverted abasic unconventional moiety for example in position 8. In other embodiments, (N)x comprises 2′O Me modified ribonucleotides at positions 2, 4, 6, 8, 11, 13, 15, 17 and 19 and may further comprise at least one abasic or inverted abasic unconventional moiety for example in position 9. In other embodiments, (N)x comprises 2′O Me modified ribonucleotides at positions 2, 4, 6, 8, 11, 13, 15, 17 and 19 and may further comprise at least one abasic or inverted abasic unconventional moiety for example in position 10. In other embodiments, (N)x comprises 2′O Me modified ribonucleotides at positions 2, 4, 6, 8, 13, 15, 17 and 19 and may further comprise at least one abasic or inverted abasic unconventional moiety for example in position 11. In other embodiments, (N)x comprises 2′O Me modified ribonucleotides at positions 2, 4, 6, 8, 11, 13, 15, 17 and 19 and may further comprise at least one abasic or inverted abasic unconventional moiety for example in position 12. In other embodiments, (N)x comprises 2′O Me modified ribonucleotides at positions 2, 4, 6, 8, 11, 15, 17 and 19 and may further comprise at least one abasic or inverted abasic unconventional moiety for example in position 13.

[0128] In yet other embodiments (N)x comprises at least one nucleotide mismatch relative to the one of the genes. In certain preferred embodiments, (N)x comprises a single nucleotide mismatch on position 5, 6, or 14. In one embodiment of Structure (C), at least two nucleotides at either or both the 5′ and 3′ termini of (N′)y are joined by a 2′-5′ phosphodiester bond. In certain preferred embodiments x=y=19 or x=y=23; in (N)x the nucleotides alternate between modified ribonucleotides and unmodified ribonucleotides, each modified ribonucleotide being modified so as to have a 2′-O-methyl on its sugar and the ribonucleotide located at the middle of (N)x being unmodified; and three nucleotides at the 3′ terminus of (N′)y are joined by two 2′-5′ phosphodiester bonds (set forth herein as Structure I). In other preferred embodiments, x=y=19 or x=y=23; in (N)x the nucleotides alternate between modified ribonucleotides and unmodified ribonucleotides, each modified ribonucleotide being modified so as to have a 2′-O-methyl on its sugar and the ribonucleotide located at the middle of (N)x being unmodified; and four consecutive nucleotides at the 5′ terminus of (N′)y are joined by three 2′-5′ phosphodiester bonds. In a further embodiment, an additional nucleotide located in the middle position of (N)y may be modified with 2′-O-methyl on its sugar. In another preferred embodiment, in (N)x the nucleotides alternate between 2′-O-methyl modified ribonucleotides and unmodified ribonucleotides, and in (N′)y four consecutive nucleotides at the 5′ terminus are joined by three 2′-5′ phosphodiester bonds and the 5′ terminal nucleotide or two or three consecutive nucleotides at the 5′ terminus comprise 3′-O-methyl modifications.

[0129] In certain preferred embodiments of Structure C, x=y=19 and in (N′)y, at least one position comprises an abasic or inverted abasic unconventional moiety, preferably five positions comprises an abasic or inverted abasic unconventional moieties. In various embodiments, the following positions comprise an abasic or inverted abasic: positions 1 and 16-19, positions 15-19, positions 1-2 and 17-19, positions 1-3 and 18-19, positions 1-4 and 19 and positions 1-5. (N′)y may further comprise at least one LNA nucleotide.

[0130] In certain preferred embodiments of Structure C, x=y=19 and in (N′)y the nucleotide in at least one position comprises a mirror nucleotide, a deoxyribonucleotide and a nucleotide joined to an adjacent nucleotide by a 2′-5′ internucleotide bond.

[0131] In certain preferred embodiments of Structure C, x=y=19 and (N′)y comprises a mirror nucleotide. In various embodiments the mirror nucleotide is an L-DNA nucleotide. In certain embodiments the L-DNA is L-deoxyribocytidine. In some embodiments (N′)y comprises L-DNA at position 18. In other embodiments (N′)y comprises L-DNA at positions 17 and 18. In certain embodiments (N′)y comprises L-DNA substitutions at positions 2 and at one or both of positions 17 and 18. In certain embodiments (N′)y further comprises a 5′ terminal cap nucleotide such as 5′-O-methyl DNA or an abasic or inverted abasic moiety as an overhang.

[0132] In yet other embodiments (N′)y comprises a DNA at position 15 and L-DNA at one or both of positions 17 and 18. In that structure, position 2 may further comprise an L-DNA or an abasic unconventional moiety.

[0133] Other embodiments of Structure C are envisaged wherein x=y=21 or wherein x=y=23; in these embodiments the modifications for (N′)y discussed above instead of being on positions 15, 16, 17, 18 are on positions 17, 18, 19, 20 for 21 mer and on positions 19, 20, 21, 22 for 23 mer; similarly the modifications at one or both of positions 17 and 18 are on one or both of positions 19 or 20 for the 21 mer and one or both of positions 21 and 22 for the 23 mer. All modifications in the 19 mer are similarly adjusted for the 21 and 23 mer.

[0134] According to various embodiments of Structure (C), in (N′)y 2, 3, 4, 5, 6, 7, 8, 9, 10, 11, 12, 13 or 14 consecutive ribonucleotides at the 3′ terminus are linked by 2′-5′ internucleotide linkages. In one preferred embodiment, four consecutive nucleotides at the 3′ terminus of (N′)y are joined by three 2′-5′ phosphodiester bonds, wherein one or more of the 2′-5′ nucleotides which form the 2′-5′ phosphodiester bonds further comprises a 3′-O-methyl sugar modification. Preferably the 3′ terminal nucleotide of (N′)y comprises a 2′-O-methyl sugar modification. In certain preferred embodiments of Structure C, x=y=19 and in (N′)y two or more consecutive nucleotides at positions 15, 16, 17, 18 and 19 comprise a nucleotide joined to an adjacent nucleotide by a 2′-5′ internucleotide bond. In various embodiments the nucleotide forming the 2′-5′ internucleotide bond comprises a 3′ deoxyribose nucleotide or a 3′ methoxy nucleotide.

[0135] In some embodiments the nucleotides at positions 17 and 18 in (N′)y are joined by a 2′-5′ internucleotide bond. In other embodiments the nucleotides at positions 16, 17, 18, 16-17, 17-18, or 16-18 in (N′)y are joined by a 2′-5′ internucleotide bond.

[0136] In certain embodiments (N′)y comprises an L-DNA at position 2 and 2′-5′ internucleotide bonds at positions 16-17, 17-18, or 16-18. In certain embodiments (N′)y comprises 2′-5′ internucleotide bonds at positions 16-17, 17-18, or 16-18 and a 5′ terminal cap nucleotide.

[0137] According to various embodiments of Structure (C), in (N′)y 2, 3, 4, 5, 6, 7, 8, 9, 10, 11, 12, 13 or 14 consecutive nucleotides at either terminus or 2-8 modified nucleotides at each of the 5′ and 3′ termini are independently mirror nucleotides. In some embodiments the mirror nucleotide is an L-ribonucleotide. In other embodiments the mirror nucleotide is an L-deoxyribonucleotide. The mirror nucleotide may further be modified at the sugar or base moiety or in an internucleotide linkage.

[0138] In one preferred embodiment of Structure (C), the 3′ terminal nucleotide or two or three consecutive nucleotides at the 3′ terminus of (N′)y are L-deoxyribonucleotides.

[0139] In other embodiments of Structure (C), in (N′)y 2, 3, 4, 5, 6, 7, 8, 9, 10, 11, 12, 13 or 14 consecutive ribonucleotides at either terminus or 2-8 modified nucleotides at each of the 5′ and 3′ termini are independently 2′ sugar modified nucleotides. In some embodiments the 2′ sugar modification comprises the presence of an amino, a fluoro, an alkoxy or an alkyl moiety. In certain embodiments the 2′ sugar modification comprises a methoxy moiety (2′-OMe). In one series of preferred embodiments, three, four or five consecutive nucleotides at the 5′ terminus of (N′)y comprise the 2′-OMe modification. In another preferred embodiment, three consecutive nucleotides at the 3′ terminus of (N′)y comprise the 2′-O-methyl modification.

[0140] In some embodiments of Structure (C), in (N′)y 2, 3, 4, 5, 6, 7, 8, 9, 10, 11, 12, 13 or 14 consecutive ribonucleotides at either or 2-8 modified nucleotides at each of the 5′ and 3′ termini are independently bicyclic nucleotide. In various embodiments the bicyclic nucleotide is a locked nucleic acid (LNA). A 2′-O, 4′-C-ethylene-bridged nucleic acid (ENA) is a species of LNA (see below).

[0141] In various embodiments (N′)y comprises modified nucleotides at the 5′ terminus or at both the 3′ and 5′ termini.

[0142] In some embodiments of Structure (C), at least two nucleotides at either or both the 5′ and 3′ termini of (N′)y are joined by P-ethoxy backbone modifications. In certain preferred embodiments x=y=19 or x=y=23; in (N)x the nucleotides alternate between modified ribonucleotides and unmodified ribonucleotides, each modified ribonucleotide being modified so as to have a 2′-O-methyl on its sugar and the ribonucleotide located at the middle position of (N)x being unmodified; and four consecutive nucleotides at the 3′ terminus or at the 5′ terminus of (N′)y are joined by three P-ethoxy backbone modifications. In another preferred embodiment, three consecutive nucleotides at the 3′ terminus or at the 5′ terminus of (N′)y are joined by two P-ethoxy backbone modifications.

[0143] In some embodiments of Structure (C), in (N′)y 2, 3, 4, 5, 6, 7 or 8, consecutive ribonucleotides at each of the 5′ and 3′ termini are independently mirror nucleotides, nucleotides joined by 2′-5′ phosphodiester bond, 2′ sugar modified nucleotides or bicyclic nucleotide. In one embodiment, the modification at the 5′ and 3′ termini of (N′)y is identical. In one preferred embodiment, four consecutive nucleotides at the 5′ terminus of (N′)y are joined by three 2′-5′ phosphodiester bonds and three consecutive nucleotides at the 3′ terminus of (N′)y are joined by two 2′-5′ phosphodiester bonds. In another embodiment, the modification at the 5′ terminus of (N′)y is different from the modification at the 3′ terminus of (N′)y. In one specific embodiment, the modified nucleotides at the 5′ terminus of (N′)y are mirror nucleotides and the modified nucleotides at the 3′ terminus of (N′)y are joined by phosphodiester bond. In another specific embodiment, three consecutive nucleotides at the 5′ terminus of (N′)y are LNA nucleotides and three consecutive nucleotides at the 3′ terminus of (N′)y are joined by two 2′-5′ phosphodiester bonds. In (N)x the nucleotides alternate between modified ribonucleotides and unmodified ribonucleotides, each modified ribonucleotide being modified so as to have a 2′-O-methyl on its sugar and the ribonucleotide located at the middle of (N)x being unmodified, or the ribonucleotides in (N)x being unmodified

[0144] In another embodiment of Structure (C), the present invention provides a compound wherein x=y=19 or x=y=23; in (N)x the nucleotides alternate between modified ribonucleotides and unmodified ribonucleotides, each modified ribonucleotide being modified so as to have a 2′-O-methyl on its sugar and the ribonucleotide located at the middle of (N)x being unmodified; three nucleotides at the 3′ terminus of (N′)y are joined by two 2′-5′ phosphodiester bonds and three nucleotides at the 5′ terminus of (N′)y are LNA such as ENA.

[0145] In another embodiment of Structure (C), five consecutive nucleotides at the 5′ terminus of (N′)y comprise the 2′-O-methyl sugar modification and two consecutive nucleotides at the 3′ terminus of (N′)y are L-DNA.

[0146] In yet another embodiment, the present invention provides a compound wherein x=y=19 or x=y=23; (N)x consists of unmodified ribonucleotides; three consecutive nucleotides at the 3′ terminus of (N′)y are joined by two 2′-5′ phosphodiester bonds and three consecutive nucleotides at the 5′ terminus of (N′)y are LNA such as ENA.

[0147] According to other embodiments of Structure (C), in (N′)y the 5′ or 3′ terminal nucleotide, or 2, 3, 4, 5 or 6 consecutive nucleotides at either termini or 1-4 modified nucleotides at each of the 5′ and 3′ termini are independently phosphonocarboxylate or phosphinocarboxylate nucleotides (PACE nucleotides). In some embodiments the PACE nucleotides are deoxyribonucleotides. In some preferred embodiments in (N′)y, 1 or 2 consecutive nucleotides at each of the 5′ and 3′ termini are PACE nucleotides.

[0148] In some embodiments, the present invention provides a compound having Structure (D):

| | | |
|---|---|---|
| (D) | 5′ (N)x-Z 3′ | antisense strand |
| | 3′ Z′-(N′)y 5′ | sense strand |

wherein each of N and N′ is a nucleotide selected from an unmodified ribonucleotide, a modified ribonucleotide, an unmodified deoxyribonucleotide or a modified deoxyribonucleotide;
wherein each of (N)x and (N′)y is an oligomer in which each consecutive nucleotide is joined to the next nucleotide by a covalent bond and each of x and y is an integer between 18 and 40;
wherein (N)x comprises unmodified ribonucleotides further comprising one modified nucleotide at the 3′ terminal or penultimate position, wherein the modified nucleotide is selected from the group consisting of a bicyclic nucleotide, a 2′ sugar modified nucleotide, a mirror nucleotide, an altritol nucleotide, or a nucleotide joined to an adjacent nucleotide by an internucleotide linkage selected from a 2′-5′ phosphodiester bond, a P-alkoxy linkage or a PACE linkage:
wherein (N′)y comprises unmodified ribonucleotides further comprising one modified nucleotide at the 5′ terminal or penultimate position, wherein the modified nucleotide is selected from the group consisting of a bicyclic nucleotide, a 2′ sugar modified nucleotide, a mirror nucleotide, an altritol nucleotide, or a nucleotide joined to an adjacent nucleotide by an internucleotide linkage selected from a 2′-5′ phosphodiester bond, a P-alkoxy linkage or a PACE linkage;
wherein in each of (N)x and (N′)y modified and unmodified nucleotides are not alternating;
wherein each of Z and Z′ may be present or absent, but if present is 1-5 deoxyribonucleotides covalently attached at the 3′ terminus of any oligomer to which it is attached;
wherein the sequence of (N′)_{y} is a sequence substantially complementary to (N)x; and wherein (N)ₓ comprises an antisense sequence substantially complementary to from about 18 to about 40 consecutive ribonucleotides in an mRNA of a target gene associated with an ear disorder.

[0149] In one embodiment of Structure (D), x=y=19 or x=y=23; (N)x comprises unmodified ribonucleotides in which two consecutive nucleotides linked by one 2′-5′ internucleotide linkage at the 3′ terminus; and (N′)y comprises unmodified ribonucleotides in which two consecutive nucleotides linked by one 2′-5′ internucleotide linkage at the 5′ terminus.

[0150] In some embodiments, x=y=19 or x=y=23; (N)x comprises unmodified ribonucleotides in which three consecutive nucleotides at the 3′ terminus are joined together by two 2′-5′ phosphodiester bonds; and (N′)y comprises unmodified ribonucleotides in which four consecutive nucleotides at the 5′ terminus are joined together by three 2′-5′ phosphodiester bonds (set forth herein as Structure II).

[0151] According to various embodiments of Structure (D) 2, 3, 4, 5, 6, 7, 8, 9, 10, 11, 12, 13 or 14 consecutive ribonucleotides starting at the ultimate or penultimate position of the 3′ terminus of (N)x and 2, 3, 4, 5, 6, 7, 8, 9, 10, 11, 12, 13 or 14 consecutive ribonucleotides starting at the ultimate or penultimate position of the 5′ terminus of (N′)y are linked by 2′-5′ internucleotide linkages.

[0152] According to one preferred embodiment of Structure (D), four consecutive nucleotides at the 5′ terminus of (N′)y are joined by three 2′-5′ phosphodiester bonds and three consecutive nucleotides at the 3′ terminus of (N′)x are joined by two 2′-5′ phosphodiester bonds. Three nucleotides at the 5′ terminus of (N′)y and two nucleotides at the 3′ terminus of (N′)x may also comprise 3′-O-methyl modifications.

[0153] According to various embodiments of Structure (D), 2, 3, 4, 5, 6, 7, 8, 9, 10, 11, 12, 13 or 14 consecutive nucleotides starting at the ultimate or penultimate position of the 3′ terminus of (N)x and 2, 3, 4, 5, 6, 7, 8, 9, 10, 11, 12, 13 or 14 consecutive ribonucleotides starting at the ultimate or penultimate position of the 5′ terminus of (N′)y are independently mirror nucleotides. In some embodiments the mirror is an L-ribonucleotide. In other embodiments the mirror nucleotide is L-deoxyribonucleotide.

[0154] In other embodiments of Structure (D), 2, 3, 4, 5, 6, 7, 8, 9, 10, 11, 12, 13 or 14 consecutive ribonucleotides starting at the ultimate or penultimate position of the 3′ terminus of (N)x and 2, 3, 4, 5, 6, 7, 8, 9, 10, 11, 12, 13 or 14 consecutive ribonucleotides starting at the ultimate or penultimate position of the 5′ terminus of (N′)y are independently 2′ sugar modified nucleotides. In some embodiments the 2′ sugar modification comprises the presence of an amino, a fluoro, an alkoxy or an alkyl moiety. In certain embodiments the 2′ sugar modification comprises a methoxy moiety (2′-OMe).

[0155] In one preferred embodiment of Structure (D), five consecutive nucleotides at the 5′ terminus of (N′)y comprise a 2′OMe sugar modification and five consecutive nucleotides at the 3′ terminus of (N′)x comprise the 2′OMe sugar modification. In another preferred embodiment of Structure (D), ten consecutive nucleotides at the 5′ terminus of (N′)y comprise the 2′OMe sugar modification and five consecutive nucleotides at the 3′ terminus of (N′)x comprise the 2′OMe sugar modification. In another preferred embodiment of Structure (D), thirteen consecutive nucleotides at the 5′ terminus of (N′)y comprise the 2′OMe sugar modification and five consecutive nucleotides at the 3′ terminus of (N′)x comprise the 2′-O-methyl modification.

[0156] In some embodiments of Structure (D), in (N′)y 2, 3, 4, 5, 6, 7, 8, 9, 10, 11, 12, 13 or 14 consecutive ribonucleotides starting at the ultimate or penultimate position of the 3′ terminus of (N)x and 2, 3, 4, 5, 6, 7, 8, 9, 10, 11, 12, 13 or 14 consecutive ribonucleotides starting at the ultimate or penultimate position of the 5′ terminus of (N′)y are independently a bicyclic nucleotide. In various embodiments the bicyclic nucleotide is a locked nucleic acid (LNA) such as a 2′-O, 4′-C-ethylene-bridged nucleic acid (ENA).

[0157] In various embodiments of Structure (D), (N′)y comprises a modified nucleotide selected from a bicyclic nucleotide, a 2′ sugar modified nucleotide, a mirror nucleotide, an altritol nucleotide or a nucleotide joined to an adjacent nucleotide by an internucleotide linkage selected from a 2′-5′ phosphodiester bond, a P-alkoxy linkage or a PACE linkage;

[0158] In various embodiments of Structure (D), (N)x comprises a modified nucleotide selected from a bicyclic nucleotide, a 2′ sugar modified nucleotide, a mirror nucleotide, an altritol nucleotide or a nucleotide joined to an adjacent nucleotide by an internucleotide linkage selected from a 2′-5′ phosphodiester bond, a P-alkoxy linkage or a PACE linkage;

[0159] In embodiments wherein each of the 3′ and 5′ termini of the same strand comprises a modified nucleotide, the modification at the 5′ and 3′ termini is identical. In another embodiment, the modification at the 5′ terminus is different from the modification at the 3′ terminus of the same strand. In one specific embodiment, the modified nucleotides at the 5′ terminus are mirror nucleotides and the modified nucleotides at the 3′ terminus of the same strand are joined by 2′-5′ phosphodiester bond.

[0160] In one specific embodiment of Structure (D), five consecutive nucleotides at the 5′ terminus of (N′)y comprise the 2′OMe sugar modification and two consecutive nucleotides at the 3′ terminus of (N′)y are L-DNA. In addition, the compound may further comprise five consecutive 2′OMe sugar modified nucleotides at the 3′ terminus of (N′)x.

[0161] In various embodiments of Structure (D), the modified nucleotides in (N)x are different from the modified nucleotides in (N′)y. For example, the modified nucleotides in (N)x are 2′ sugar modified nucleotides and the modified nucleotides in (N′)y are nucleotides linked by 2′-5′ internucleotide linkages. In another example, the modified nucleotides in (N)x are mirror nucleotides and the modified nucleotides in (N′)y are nucleotides linked by 2′-5′ internucleotide linkages. In another example, the modified nucleotides in (N)x are nucleotides linked by 2′-5′ internucleotide linkages and the modified nucleotides in (N′)y are mirror nucleotides.

[0162] In additional embodiments, the present invention provides a compound having Structure (E):

| | | |
|---|---|---|
| (E) | 5′ (N)x-Z 3′ | antisense strand |
| | 3′ Z′-(N′)y 5′ | sense strand |

wherein each of N and N′ is a nucleotide selected from an unmodified ribonucleotide, a modified ribonucleotide, an unmodified deoxyribonucleotide or a modified deoxyribonucleotide;
wherein each of (N)x and (N′)y is an oligomer in which each consecutive nucleotide is joined to the next nucleotide by a covalent bond and each of x and y is an integer between 18 and 40;
wherein (N)x comprises unmodified ribonucleotides further comprising one modified nucleotide at the 5′ terminal or penultimate position, wherein the modified nucleotide is selected from the group consisting of a bicyclic nucleotide, a 2′ sugar modified nucleotide, a mirror nucleotide, an altritol nucleotide, or a nucleotide joined to an adjacent nucleotide by an internucleotide linkage selected from a 2′-5′ phosphodiester bond, a P-alkoxy linkage or a PACE linkage;
wherein (N′)y comprises unmodified ribonucleotides further comprising one modified nucleotide at the 3′ terminal or penultimate position, wherein the modified nucleotide is selected from the group consisting of a bicyclic nucleotide, a 2′ sugar modified nucleotide, a mirror nucleotide, an altritol nucleotide, or a nucleotide joined to an adjacent nucleotide by an internucleotide linkage selected from a 2′-5′ phosphodiester bond, a P-alkoxy linkage or a PACE linkage;
wherein in each of (N)x and (N′)y modified and unmodified nucleotides are not alternating;
wherein each of Z and Z′ may be present or absent, but if present is 1-5 deoxyribonucleotides covalently attached at the 3′ terminus of any oligomer to which it is attached;
wherein the sequence of (N′)_{y} is a sequence substantially complementary to (N)x; and wherein the sequence of (N)ₓ comprises an antisense sequence substantially complementary to from about 18 to about 40 consecutive ribonucleotides in an mRNA of a target gene associated with an ear disorder.

[0163] In certain preferred embodiments the ultimate nucleotide at the 5′ terminus of (N)x is unmodified.

[0164] According to various embodiments of Structure (E) 2, 3, 4, 5, 6, 7, 8, 9, 10, 11, 12, 13 or 14 consecutive ribonucleotides starting at the ultimate or penultimate position of the 5′ terminus of (N)ₓ, preferably starting at the 5′ penultimate position, and 2, 3, 4, 5, 6, 7, 8, 9, 10, 11, 12, 13 or 14 consecutive ribonucleotides starting at the ultimate or penultimate position of the 3′ terminus of (N′)y are linked by 2′-5′ internucleotide linkages.

[0165] According to various embodiments of Structure (E), 2, 3, 4, 5, 6, 7, 8, 9, 10, II, 12, 13 or 14 consecutive nucleotides starting at the ultimate or penultimate position of the 5′ terminus of (N)ₓ, preferably starting at the 5′ penultimate position, and 2, 3, 4, 5, 6, 7, 8, 9, 10, 11, 12, 13 or 14 consecutive nucleotides starting at the ultimate or penultimate position of the 3′ terminus of (N′)y are independently mirror nucleotides. In some embodiments the mirror is an L-ribonucleotide. In other embodiments the mirror nucleotide is L-deoxyribonucleotide.

[0166] In other embodiments of Structure (E), 2, 3, 4, 5, 6, 7, 8, 9, 10, 11, 12, 13 or 14 consecutive ribonucleotides starting at the ultimate or penultimate position of the 5′ terminus of (N)ₓ, preferably starting at the 5′ penultimate position, and 2, 3, 4, 5, 6, 7, 8, 9, 10, 11, 12, 13 or 14 consecutive ribonucleotides starting at the ultimate or penultimate position of the 3′ terminus of (N′)y are independently 2′ sugar modified nucleotides. In some embodiments the 2′ sugar modification comprises the presence of an amino, a fluoro, an alkoxy or an alkyl moiety. In certain embodiments the 2′ sugar modification comprises a methoxy moiety (2′-OMe).

[0167] In some embodiments of Structure (E), in (N′)y 2, 3, 4, 5, 6, 7, 8, 9, 10, 11, 12, 13 or 14 consecutive ribonucleotides starting at the ultimate or penultimate position of the 5′ terminus of (N)ₓ, preferably starting at the 5′ penultimate position, and 2, 3, 4, 5, 6, 7, 8, 9, 10, 11, 12, 13 or 14 consecutive ribonucleotides starting at the ultimate or penultimate position of the 3′ terminus of (N′)y are independently a bicyclic nucleotide. In various embodiments the bicyclic nucleotide is a locked nucleic acid (INA) such as a 2′-O, 4′-C-ethylene-bridged nucleic acid (ENA).

[0168] In various embodiments of Structure (E), (N′)y comprises modified nucleotides selected from a bicyclic nucleotide, a 2′ sugar modified nucleotide, a mirror nucleotide, an altritol nucleotide, a nucleotide joined to an adjacent nucleotide by a P-alkoxy backbone modification or a nucleotide joined to an adjacent nucleotide by an internucleotide linkage selected from a 2′-5′ phosphodiester bond, a P-alkoxy linkage or a PACE linkage at the 3′ terminus or at each of the 3′ and 5′ termini.

[0169] In various embodiments of Structure (E), (N)x comprises a modified nucleotide selected from a bicyclic nucleotide, a 2′ sugar modified nucleotide, a mirror nucleotide, an altritol nucleotide, or a nucleotide joined to an adjacent nucleotide by an internucleotide linkage selected from a 2′-5′ phosphodiester bond, a P-alkoxy linkage or a PACE linkage at the 5′ terminus or at each of the 3′ and 5′ termini.

[0170] In one embodiment where both 3′ and 5′ termini of the same strand comprise a modified nucleotide, the modification at the 5′ and 3′ termini is identical. In another embodiment, the modification at the 5′ terminus is different from the modification at the 3′ terminus of the same strand. In one specific embodiment, the modified nucleotides at the 5′ terminus are mirror nucleotides and the modified nucleotides at the 3′ terminus of the same strand are joined by 2′-5′ phosphodiester bond.

[0171] In various embodiments of Structure (E), the modified nucleotides in (N)x are different from the modified nucleotides in (N′)y. For example, the modified nucleotides in (N)x are 2′ sugar modified nucleotides and the modified nucleotides in (N′)y are nucleotides linked by 2′-5′ internucleotide linkages. In another example, the modified nucleotides in (N)x are mirror nucleotides and the modified nucleotides in (N′)y are nucleotides linked by 2′-5′ internucleotide linkages. In another example, the modified nucleotides in (N)x are nucleotides linked by 2′-5′ internucleotide linkages and the modified nucleotides in (N′)y are mirror nucleotides.

[0172] In additional embodiments, the present invention provides a compound having Structure (F):

| | | |
|---|---|---|
| (F) | 5′ (N)x-Z 3′ | antisense strand |
| | 3′ Z′-(N′)y 5′ | sense strand |

wherein each of N and N′ is a nucleotide selected from an unmodified ribonucleotide, a modified ribonucleotide, an unmodified deoxyribonucleotide or a modified deoxyribonucleotide;
wherein each of (N)x and (N′)y is an oligomer in which each consecutive nucleotide is joined to the next nucleotide by a covalent bond and each of x and y is an integer between 18 and 40;
wherein each of (N)x and (N′)y comprise unmodified ribonucleotides in which each of (N)x and (N′)y independently comprise one modified nucleotide at the 3′ terminal or penultimate position wherein the modified nucleotide is selected from the group consisting of a bicyclic nucleotide, a 2′ sugar modified nucleotide, a mirror nucleotide, a nucleotide joined to an adjacent nucleotide by a P-alkoxy backbone modification or a nucleotide joined to an adjacent nucleotide by a 2′-5′ phosphodiester bond;
wherein in each of (N)x and (N′)y modified and unmodified nucleotides are not alternating;
wherein each of Z and Z′ may be present or absent, but if present is 1-5 deoxyribonucleotides covalently attached at the 3′ terminus of any oligomer to which it is attached;
wherein the sequence of (N′)_{y} is a sequence substantially complementary to (N)x; and wherein the sequence of (N)ₓ comprises an antisense sequence substantially complementary to from about 18 to about 40 consecutive ribonucleotides in an mRNA of a target gene associated with an ear disorder.

[0173] In some embodiments of Structure (F), x=y=19 or x=y=23; (N′)y comprises unmodified ribonucleotides in which two consecutive nucleotides at the 3′ terminus comprises two consecutive mirror deoxyribonucleotides; and (N)x comprises unmodified ribonucleotides in which one nucleotide at the 3′ terminus comprises a mirror deoxyribonucleotide (set forth as Structure III).

[0174] According to various embodiments of Structure (F) 2, 3, 4, 5, 6, 7, 8, 9, 10, 11, 12, 13 or 14 consecutive ribonucleotides independently beginning at the ultimate or penultimate position of the 3′ termini of (N)x and (N′)y are linked by 2′-5′ internucleotide linkages. According to one preferred embodiment of Structure (F), three consecutive nucleotides at the 3′ terminus of (N′)y are joined by two 2′-5′ phosphodiester bonds and three consecutive nucleotides at the 3′ terminus of (N′)x are joined by two 2′-5′ phosphodiester bonds.

[0175] According to various embodiments of Structure (F), 2, 3, 4, 5, 6, 7, 8, 9, 10, 11, 12, 13 or 14 consecutive nucleotides independently beginning at the ultimate or penultimate position of the 3′ termini of (N)x and (N′)y are independently mirror nucleotides. In some embodiments the mirror nucleotide is an L-ribonucleotide. In other embodiments the mirror nucleotide is an L-deoxyribonucleotide.

[0176] In other embodiments of Structure (F), 2, 3, 4, 5, 6, 7, 8, 9, 10, 11, 12, 13 or 14 consecutive ribonucleotides independently beginning at the ultimate or penultimate position of the 3′ termini of (N)x and (N′)y are independently 2′ sugar modified nucleotides. In some embodiments the 2′ sugar modification comprises the presence of an amino, a fluoro, an alkoxy or an alkyl moiety. In certain embodiments the 2′ sugar modification comprises a methoxy moiety (2′-OMe).

[0177] In some embodiments of Structure (F), 2, 3, 4, 5, 6, 7, 8, 9, 10, 11, 12, 13 or 14 consecutive ribonucleotides independently beginning at the ultimate or penultimate position of the 3′ termini of (N)x and (N′)y are independently a bicyclic nucleotide. In various embodiments the bicyclic nucleotide is a locked nucleic acid (LNA) such as a 2′-O, 4′-C-ethylene-bridged nucleic acid (ENA).

[0178] In various embodiments of Structure (F), (N′)y comprises a modified nucleotide selected from a bicyclic nucleotide, a 2′ sugar modified nucleotide, a mirror nucleotide, an altritol nucleotide, or a nucleotide joined to an adjacent nucleotide by an internucleotide linkage selected from a 2′-5′ phosphodiester bond, a P-alkoxy linkage or a PACE linkage at the 3′ terminus or at both the 3′ and 5′ termini.

[0179] In various embodiments of Structure (F), (N)x comprises a modified nucleotide selected from a bicyclic nucleotide, a 2′ sugar modified nucleotide, a mirror nucleotide, an altritol nucleotide, or a nucleotide joined to an adjacent nucleotide by an internucleotide linkage selected from a 2′-5′ phosphodiester bond, a P-alkoxy linkage or a PACE linkage at the 3′ terminus or at each of the 3′ and 5′ termini.

[0180] In one embodiment where each of 3′ and 5′ termini of the same strand comprise a modified nucleotide, the modification at the 5′ and 3′ termini is identical. In another embodiment, the modification at the 5′ terminus is different from the modification at the 3′ terminus of the same strand. In one specific embodiment, the modified nucleotides at the 5′ terminus are mirror nucleotides and the modified nucleotides at the 3′ terminus of the same strand are joined by 2′-5′ phosphodiester bond.

[0181] In various embodiments of Structure (F), the modified nucleotides in (N)x are different from the modified nucleotides in (N′)y. For example, the modified nucleotides in (N)x are 2′ sugar modified nucleotides and the modified nucleotides in (N′)y are nucleotides linked by 2′-5′ internucleotide linkages. In another example, the modified nucleotides in (N)x are mirror nucleotides and the modified nucleotides in (N′)y are nucleotides linked by 2′-5′ internucleotide linkages. In another example, the modified nucleotides in (N)x are nucleotides linked by 2′-5′ internucleotide linkages and the modified nucleotides in (N′)y are mirror nucleotides.

[0182] In additional embodiments, the present invention provides a compound having

### Structure (G):

| | | |
|---|---|---|
| (G) | 5′ (N)x-Z 3′ | antisense strand |
| | 3′ Z′-(N′)y 5′ | sense strand |

wherein each of N and N′ is a nucleotide selected from an unmodified ribonucleotide, a modified ribonucleotide, an unmodified deoxyribonucleotide or a modified deoxyribonucleotide;
wherein each of (N)x and (N′)y is an oligomer in which each consecutive nucleotide is joined to the next nucleotide by a covalent bond and each of x and y is an integer between 18 and 40;
wherein each of (N)x and (N′)y comprise unmodified ribonucleotides in which each of (N)x and (N′)y independently comprise one modified nucleotide at the 5′ terminal or penultimate position wherein the modified nucleotide is selected from the group consisting of a bicyclic nucleotide, a 2′ sugar modified nucleotide, a mirror nucleotide, a nucleotide joined to an adjacent nucleotide by a P-alkoxy backbone modification or a nucleotide joined to an adjacent nucleotide by a 2′-5′ phosphodiester bond;
wherein for (N)x the modified nucleotide is preferably at penultimate position of the 5′ terminal;
wherein in each of (N)x and (N′)y modified and unmodified nucleotides are not alternating;
wherein each of Z and Z′ may be present or absent, but if present is 1-5 deoxyribonucleotides covalently attached at the 3′ terminus of any oligomer to which it is attached;
wherein the sequence of (N′)_{y} is a sequence substantially complementary to (N)x; and wherein the sequence of (N)ₓ comprises an antisense sequence substantially complementary to from about 18 to about 40 consecutive ribonucleotides in an mRNA of a target gene associated with an ear disorder.

[0184] In some embodiments of Structure (G), x=y=19 or x=y=23.

[0185] According to various embodiments of Structure (G) 2, 3, 4, 5, 6, 7, 8, 9, 10, 11, 12, 13 or 14 consecutive ribonucleotides independently beginning at the ultimate or penultimate position of the 5′ termini of (N)x and (N′)y are linked by 2′-5′ internucleotide linkages. For (N)x the modified nucleotides preferably starting at the penultimate position of the 5′ terminal.

[0186] According to various embodiments of Structure (G), 2, 3, 4, 5, 6, 7, 8, 9, 10, 11, 12, 13 or 14 consecutive nucleotides independently beginning at the ultimate or penultimate position of the 5′ termini of (N)x and (N′)y are independently mirror nucleotides. In some embodiments the minor nucleotide is an L-ribonucleotide. In other embodiments the mirror nucleotide is an L-deoxyribonucleotide. For (N)x the modified nucleotides preferably starting at the penultimate position of the 5′ terminal.

[0187] In other embodiments of Structure (G), 2, 3, 4, 5, 6, 7, 8, 9, 10, 11, 12, 13 or 14 consecutive ribonucleotides independently beginning at the ultimate or penultimate position of the 5′ termini of (N)x and (N′)y are independently 2′ sugar modified nucleotides. In some embodiments the 2′ sugar modification comprises the presence of an amino, a fluoro, an alkoxy or an alkyl moiety. In certain embodiments the 2′ sugar modification comprises a methoxy moiety (2′-OMe). In some preferred embodiments the consecutive modified nucleotides preferably begin at the penultimate position of the 5′ terminus of (N)ₓ.

[0188] In one preferred embodiment of Structure (G), five consecutive ribonucleotides at the 5′ terminus of (N′)y comprise a 2′OMe sugar modification and one ribonucleotide at the 5′ penultimate position of (N′)x comprises a 2′OMe sugar modification. In another preferred embodiment of Structure (G), five consecutive ribonucleotides at the 5′ terminus of (N′)y comprise 2′OMe sugar modification and two consecutive ribonucleotides at the 5′ terminal position of (N′)x comprise a 2′OMe sugar modification.

[0189] In some embodiments of Structure (G), 2, 3, 4, 5, 6, 7, 8, 9, 10, 11, 12, 13 or 14 consecutive ribonucleotides independently beginning at the ultimate or penultimate position of the 5′ termini of (N)x and (N′)y are bicyclic nucleotides. In various embodiments the bicyclic nucleotide is a locked nucleic acid (LNA) such as a 2′-O, 4′-C-ethylene-bridged nucleic acid (ENA). In some preferred embodiments the consecutive modified nucleotides preferably begin at the penultimate position of the 5′ terminus of (N)ₓ.

[0190] In various embodiments of Structure (G), (N′)y comprises a modified nucleotide selected from a bicyclic nucleotide, a 2′ sugar modified nucleotide, a mirror nucleotide, an altritol nucleotide, or a nucleotide joined to an adjacent nucleotide by an internucleotide linkage selected from a 2′-5′ phosphodiester bond, a P-alkoxy linkage or a PACE linkage at the 5′ terminus or at each of the 3′ and 5′ termini.

[0191] In various embodiments of Structure (G), (N)x comprises a modified nucleotide selected from a bicyclic nucleotide, a 2′ sugar modified nucleotide, a mirror nucleotide, an altritol nucleotide, or a nucleotide joined to an adjacent nucleotide by an internucleotide linkage selected from a 2′-5′ phosphodiester bond, a P-alkoxy linkage or a PACE linkage at the 5′ terminus or at each of the 3′ and 5′ termini.

[0192] In one embodiment where each of 3′ and 5′ termini of the same strand comprise a modified nucleotide, the modification at the 5′ and 3′ termini is identical. In another embodiment, the modification at the 5′ terminus is different from the modification at the 3′ terminus of the same strand. In one specific embodiment, the modified nucleotides at the 5′ terminus are mirror nucleotides and the modified nucleotides at the 3′ terminus of the same strand are joined by 2′-5′ phosphodiester bond. In various embodiments of Structure (G), the modified nucleotides in (N)x are different from the modified nucleotides in (N′)y. For example, the modified nucleotides in (N)x are 2′ sugar modified nucleotides and the modified nucleotides in (N′)y are nucleotides linked by 2′-5′ internucleotide linkages. In another example, the modified nucleotides in (N)x are mirror nucleotides and the modified nucleotides in (N′)y are nucleotides linked by 2′-5′ internucleotide linkages. In another example, the modified nucleotides in (N)x are nucleotides linked by 2′-5′ internucleotide linkages and the modified nucleotides in (N′)y are mirror nucleotides.

[0193] In additional embodiments, the present invention provides a compound having Structure (H):

| | | |
|---|---|---|
| (H) | 5′ (N)x-Z 3′ | antisense strand |
| | 3′ Z′-(N′)y 5′ | sense strand |

wherein each of N and N′ is a nucleotide selected from an unmodified ribonucleotide, a modified ribonucleotide, an unmodified deoxyribonucleotide or a modified deoxyribonucleotide;
wherein each of (N)x and (N′)y is an oligomer in which each consecutive nucleotide is joined to the next nucleotide by a covalent bond and each of x and y is an integer between 18 and 40;
wherein (N)x comprises unmodified ribonucleotides further comprising one modified nucleotide at the 3′ terminal or penultimate position or the 5′ terminal or penultimate position, wherein the modified nucleotide is selected from the group consisting of a bicyclic nucleotide, a 2′ sugar modified nucleotide, a mirror nucleotide, an altritol nucleotide, or a nucleotide joined to an adjacent nucleotide by an internucleotide linkage selected from a 2′-5′ phosphodiester bond, a P-alkoxy linkage or a PACE linkage;
wherein (N′)y comprises unmodified ribonucleotides further comprising one modified nucleotide at an internal position, wherein the modified nucleotide is selected from the group consisting of a bicyclic nucleotide, a 2′ sugar modified nucleotide, a mirror nucleotide, an altritol nucleotide, or a nucleotide joined to an adjacent nucleotide by an internucleotide linkage selected from a 2′-5′ phosphodiester bond, a P-alkoxy linkage or a PACE linkage;
wherein in each of (N)x and (N′)y modified and unmodified nucleotides are not alternating;
wherein each of Z and Z′ may be present or absent, but if present is 1-5 deoxyribonucleotides covalently attached at the 3′ terminus of any oligomer to which it is attached;
wherein the sequence of (N′)y is a sequence substantially complementary to (N)x; and wherein the sequence of (N)ₓ comprises an antisense sequence substantially complementary to from about 18 to about 40 consecutive ribonucleotides in an mRNA of a target gene associated with an ear disorder.

[0194] In one embodiment of Structure (H), 2, 3, 4, 5, 6, 7, 8, 9, 10, 11, 12, 13 or 14 consecutive ribonucleotides independently beginning at the ultimate or penultimate position of the 3′ terminus or the 5′ terminus or both termini of (N)x are independently 2′ sugar modified nucleotides, bicyclic nucleotides, mirror nucleotides, altritol nucleotides or nucleotides joined to an adjacent nucleotide by a 2′-5′ phosphodiester bond and 2, 3, 4, 5, 6, 7, 8, 9, 10, 11, 12, 13 or 14 consecutive internal ribonucleotides in (N′)y are independently 2′ sugar modified nucleotides, bicyclic nucleotides, mirror nucleotides, altritol nucleotides or nucleotides joined to an adjacent nucleotide by a 2′-5′ phosphodiester bond. In some embodiments the 2′ sugar modification comprises the presence of an amino, a fluoro, an alkoxy or an alkyl moiety. In certain embodiments the 2′ sugar modification comprises a methoxy moiety (2′-OMe).

[0195] In another embodiment of Structure (II), 2, 3, 4, 5, 6, 7, 8, 9, 10, 11, 12, 13 or 14 consecutive ribonucleotides independently beginning at the ultimate or penultimate position of the 3′ terminus or the 5′ terminus or 2-8 consecutive nucleotides at each of 5′ and 3′ termini of (N′)y are independently 2′ sugar modified nucleotides, bicyclic nucleotides, mirror nucleotides, altritol nucleotides or nucleotides joined to an adjacent nucleotide by a 2′-5′ phosphodiester bond, and 2, 3, 4, 5, 6, 7, 8, 9, 10, 11, 12, 13 or 14 consecutive internal ribonucleotides in (N)x are independently 2′ sugar modified nucleotides, bicyclic nucleotides, mirror nucleotides, altritol nucleotides or nucleotides joined to an adjacent nucleotide by a 2′-5′ phosphodiester bond.

[0196] In one embodiment wherein each of 3′ and 5′ termini of the same strand comprises a modified nucleotide, the modification at the 5′ and 3′ termini is identical. In another embodiment, the modification at the 5′ terminus is different from the modification at the 3′ terminus of the same strand. In one specific embodiment, the modified nucleotides at the 5′ terminus are mirror nucleotides and the modified nucleotides at the 3′ terminus of the same strand are joined by 2′-5′ phosphodiester bond.

[0197] In various embodiments of Structure (H), the modified nucleotides in (N)x are different from the modified nucleotides in (N′)y. For example, the modified nucleotides in (N)x are 2′ sugar modified nucleotides and the modified nucleotides in (N′)y are nucleotides linked by 2′-5′ internucleotide linkages. In another example, the modified nucleotides in (N)x are mirror nucleotides and the modified nucleotides in (N′)y are nucleotides linked by 2′-5′ internucleotide linkages. In another example, the modified nucleotides in (N)x are nucleotides linked by 2′-5′ internucleotide linkages and the modified nucleotides in (N′)y are minor nucleotides.

[0198] In one preferred embodiment of Structure (H), x=y=19; three consecutive ribonucleotides at the 9-11 nucleotide positions 9-11 of (N′)y comprise 2′OMe sugar modification and five consecutive ribonucleotides at the 3′ terminal position of (N′)x comprise 2′OMe sugar modification.

[0199] For all the above Structures (A)-(H), in various embodiments x=y and each of x and y is 19, 20, 21, 22 or 23. In certain embodiments, x=y=19. In yet other embodiments x=y=23. In additional embodiments the compound comprises modified ribonucleotides in alternating positions wherein each N at the 5′ and 3′ termini of (N)x are modified in their sugar residues and the middle ribonucleotide is not modified, e.g. ribonucleotide in position 10 in a 19-mer strand, position 11 in a 21 mer and position 12 in a 23-mer strand.

[0200] In some embodiments where x=y=21 or x=y=23 the position of modifications in the 19 mer are adjusted for the 21 and 23 mers with the proviso that the middle nucleotide of the antisense strand is preferably not modified.

[0201] In some embodiments, neither (N)x nor (N′)y are phosphorylated at the 3′ and 5′ termini. In other embodiments either or both (N)x and (N′)y are phosphorylated at the 3′ termini. In yet another embodiment, either or both (N)x and (N′)y are phosphorylated at the 3′ termini using non-cleavable phosphate groups. In yet another embodiment, either or both (N)x and (N′)y are phosphorylated at the terminal 2′ termini position using cleavable or non-cleavable phosphate groups. These particular siRNA compounds are also blunt ended and are non-phosphorylated at the termini; however, comparative experiments have shown that siRNA compounds phosphorylated at one or both of the 3′-termini have similar activity in vivo compared to the non-phosphorylated compounds.

[0202] In certain embodiments for all the above-mentioned Structures, the compound is blunt ended, for example wherein both Z and Z′ are absent. In an alternative embodiment, the compound comprises at least one 3′ overhang, wherein at least one of Z or Z′ is present. Z and Z′ independently comprises one or more covalently linked modified or non-modified nucleotides, for example inverted dT or dA; dT, LNA, mirror nucleotide and the like. In some embodiments each of Z and Z′ are independently selected from dT and dTdT. siRNA in which Z and/or Z′ is present have similar activity and stability as siRNA in which Z and Z′ are absent.

[0203] In certain embodiments for all the above-mentioned Structures, the compound comprises one or more phosphonocarboxylate and/or phosphinocarboxylate nucleotides (PACE nucleotides). In some embodiments the PACE nucleotides are deoxyribonucleotides and the phosphinocarboxylate nucleotides are phosphinoacetate nucleotides. Examples of PACE nucleotides and analogs are disclosed in U.S. Pat. Nos. 6,693,187 and 7,067,641, both incorporated herein by reference.

[0204] In certain embodiments for all the above-mentioned Structures, the compound comprises one or more locked nucleic acids (LNA) also defined as bridged nucleic acids or bicyclic nucleotides. Preferred locked nucleic acids are 2′-O, 4′-C-ethylene nucleosides (ENA) or 2′-O, 4′-C-methylene nucleosides. Other examples of LNA and ENA nucleotides are disclosed in WO 98/39352, WO 00/47599 and WO 99/14226, all incorporated herein by reference.

[0205] In certain embodiments for all the above-mentioned Structures, the compound comprises one or more altritol monomers (nucleotides), also defined as 1,5 anhydro-2-deoxy-D-altrito-hexitol (see for example, Allart, et al., 1998. Nucleosides & Nucleotides 17:1523-1526; Herdewijn et al., 1999. Nucleosides & Nucleotides 18:1371-1376; Fisher et al., 2007, NAR 35(4):1064-1074; all incorporated herein by reference).

[0206] The present invention explicitly excludes compounds in which each of N and for N′ is a deoxyribonucleotide (D-A, D-C, D-G, D-T). In certain embodiments (N)x and (N′)y may comprise independently 1, 2, 3, 4, 5, 6, 7, 8, 9 or more deoxyribonucleotides. In certain embodiments the present invention provides a compound wherein each of N is an unmodified ribonucleotide and the 3′ terminal nucleotide or 2, 3, 4, 5, 6, 7, 8, 9, 10, 11, 12, 13 or 14 consecutive nucleotides at the 3′ terminus of (N′)y are deoxyribonucleotides. In yet other embodiments each of N is an unmodified ribonucleotide and the 5′ terminal nucleotide or 2, 3, 4, 5, 6, 7, 8, 9, 10, 11, 12, 13 or 14 consecutive nucleotides at the 5′ terminus of (N′)y are deoxyribonucleotides. In further embodiments the 5′ terminal nucleotide or 2, 3, 4, 5, 6, 7, 8, or 9 consecutive nucleotides at the 5′ terminus and 1, 2, 3, 4, 5, or 6 consecutive nucleotides at the 3′ termini of (N)x are deoxyribonucleotides and each of N′ is an unmodified ribonucleotide. In yet further embodiments (N)x comprises unmodified ribonucleotides and 1 or 2, 3 or 4 consecutive deoxyribonucleotides independently at each of the 5′ and 3′ termini and 1 or 2, 3, 4, 5 or 6 consecutive deoxyribonucleotides in internal positions; and each of N′ is an unmodified ribonucleotide. In certain embodiments the 3′ terminal nucleotide or 2, 3, 4, 5, 6, 7, 8, 9, 10, 11, 12 13 or 14 consecutive nucleotides at the 3′ terminus of (N′)y and the terminal 5′ nucleotide or 2, 3, 4, 5, 6, 7, 8, 9, 10, 11, 12 13 or 14 consecutive nucleotides at the 5′ terminus of (N)x are deoxyribonucleotides. The present invention excludes compounds in which each of N and/or N′ is a deoxyribonucleotide. In some embodiments the 5′ terminal nucleotide of N or 2 or 3 consecutive of N and 1, 2, or 3 of N′ is a deoxyribonucleotide. Certain examples of active DNA/RNA siRNA chimeras are disclosed in US patent publication 2005/0004064, and Ui-Tei, 2008 (NAR 36(7):2136-2151) incorporated herein by reference in their entirety.

[0207] Unless otherwise indicated, in preferred embodiments of the structures discussed herein the covalent bond between each consecutive N or N′ is a phosphodiester bond.

[0208] An additional novel molecule provided by the present invention is an oligonucleotide comprising consecutive nucleotides wherein a first segment of such nucleotides encode a first inhibitory RNA molecule, a second segment of such nucleotides encode a second inhibitory RNA molecule, and a third segment of such nucleotides encode a third inhibitory RNA molecule. Each of the first, the second and the third segment may comprise one strand of a double stranded RNA and the first, second and third segments may be joined together by a linker. Further, the oligonucleotide may comprise three double stranded segments joined together by one or more linker.

[0209] Thus, one molecule provided by the present invention is an oligonucleotide comprising consecutive nucleotides which encode three inhibitory RNA molecules; said oligonucleotide may possess a triple stranded structure, such that three double stranded arms are linked together by one or more linker, such as any of the linkers presented hereinabove. This molecule forms a “star”-like structure, and may also be referred to herein as RNAstar. Such structures are disclosed in PCT patent publication WO 2007/091269, assigned to the assignee of the present invention and incorporated herein in its entirety by reference.

[0210] A covalent bond refers to an internucleotide linkage linking one nucleotide monomer to an adjacent nucleotide monomer. A covalent bond includes for example, a phosphodiester bond, a phosphorothioate bond, a P-alkoxy bond, a P-carboxy bond and the like. The normal internucleoside linkage of RNA and DNA is a 3′ to 5′ phosphodiester linkage. In certain preferred embodiments a covalent bond is a phosphodiester bond. Covalent bond encompasses non-phosphorous-containing internucleoside linkages, such as those disclosed in WO 2004/041924 inter alia. Unless otherwise indicated, in preferred embodiments of the structures discussed herein the covalent bond between each consecutive N or N′ is a phosphodiester bond.

[0211] For all of the structures above, in some embodiments the oligonucleotide sequence of (N)x is fully complementary to the oligonucleotide sequence of (N′)_{y}. In other embodiments (N)x and (N′)y are substantially complementary. In certain embodiments (N)x is fully complementary to a target sequence. In other embodiments (N)x is substantially complementary to a target sequence.

[0212] In some embodiments, neither (N)x nor (N′)y are phosphorylated at the 3′ and 5′ termini. In other embodiments either or both (N)x and (N′)y are phosphorylated at the 3′ termini (3′ Pi). In yet another embodiment, either or both (N)x and (N′)y are phosphorylated at the 3′ termini with non-cleavable phosphate groups. In yet another embodiment, either or both (N)x and (N′)y are phosphorylated at the terminal 2′ termini position using cleavable or non-cleavable phosphate groups. Further, the inhibitory nucleic acid molecules of the present invention may comprise one or more gaps and/or one or more nicks and/or one or more mismatches. Without wishing to be bound by theory, gaps, nicks and mismatches have the advantage of partially destabilizing the nucleic acid/siRNA, so that it may be more easily processed by endogenous cellular machinery such as DICER, DROSHA or RISC into its inhibitory components.

[0213] In the context of the present invention, a gap in a nucleic acid refers to the absence of one or more internal nucleotides in one strand, while a nick in a nucleic acid refers to the absence of an internucleotide linkage between two adjacent nucleotides in one strand. Any of the molecules of the present invention may contain one or more gaps and/or one or more nicks.

[0214] In one aspect the present invention provides a compound having Structure (I):

| | | |
|---|---|---|
| (I) | 5′ (N)x-Z 3′ | (antisense strand) |
| | 3′ Z′-(N′)y-z″ 5′ | (sense strand) |

wherein each of N and N′ is a ribonucleotide which may be unmodified or modified, or an unconventional moiety;
wherein each of (N)x and (N′)y is an oligonucleotide in which each consecutive N or N′ is joined to the next N or N′ by a covalent bond;
wherein Z and Z′ may be present or absent, but if present is independently 1-5 consecutive nucleotides covalently attached at the 3′ terminus of the strand in which it is present;
wherein z″ may be present or absent, but if present is a capping moiety covalently attached at the 5′ terminus of (N′)y;
wherein x=18 to 27;
wherein y=18 to 27;
wherein (N)x comprises modified and unmodified ribonucleotides, each modified ribonucleotide having a 2′-O-methyl on its sugar, wherein N at the 3′ terminus of (N)x is a modified ribonucleotide, (N)x comprises at least five alternating modified ribonucleotides beginning at the 3′ end and at least nine modified ribonucleotides in total and each remaining N is an unmodified ribonucleotide;
wherein in (N′)y at least one unconventional moiety is present, which unconventional moiety may be an abasic ribose moiety, an abasic deoxyribose moiety, a modified or unmodified deoxyribonucleotide, a minor nucleotide, and a nucleotide joined to an adjacent nucleotide by a internucleotide phosphate bond; and
wherein the sequence of (N′)_{y} is a sequence substantially complementary to (N)x; and wherein the sequence of (N)ₓ comprises an antisense sequence substantially complementary to from about 18 to about 40 consecutive ribonucleotides in an mRNA of a target gene associated with an ear disorder.

[0215] In some embodiments x=y=19. In other embodiments x=y=23. In some embodiments the at least one unconventional moiety is present at positions 15, 16, 17, or 18 in (N′)y. In some embodiments the unconventional moiety is selected from a minor nucleotide, an abasic ribose moiety and an abasic deoxyribose moiety. In some preferred embodiments the unconventional moiety is a mirror nucleotide, preferably an L-DNA moiety. In some embodiments an L-DNA moiety is present at position 17, position 18 or positions 17 and 18.

[0216] In other embodiments the unconventional moiety is an abasic moiety. In various embodiments (N′)y comprises at least five abasic ribose moieties or abasic deoxyribose moieties.

[0217] In yet other embodiments (N′)y comprises at least five abasic ribose moieties or abasic deoxyribose moieties and at least one of N′ is an LNA.

[0218] In some embodiments (N)x comprises nine alternating modified ribonucleotides. In other embodiments of Structure (I) (N)x comprises nine alternating modified ribonucleotides further comprising a 2′O modified nucleotide at position 2. In some embodiments (N)x comprises 2′O Me modified ribonucleotides at the odd numbered positions 1, 3, 5, 7, 9, 11, 13, 15, 17, 19. In other embodiments (N)x further comprises a 2′O Me modified ribonucleotide at one or both of positions 2 and 18. In yet other embodiments (N)x comprises 2′O Me modified ribonucleotides at positions 2, 4, 6, 8, 11, 13, 15, 17, 19.

[0219] In various embodiments z″ is present and is selected from an abasic ribose moiety, a deoxyribose moiety; an inverted abasic ribose moiety, a deoxyribose moiety; C6-amino-Pi; a mirror nucleotide.

[0220] In another aspect the present invention provides a compound having Structure (J) set forth below:

| | | |
|---|---|---|
| (J) | 5′ (N)x-Z 3′ | (antisense strand) |
| | 3′ Z′-(N′)y-z″ 5′ | (sense strand) |

wherein each of N and N′ is a ribonucleotide which may be unmodified or modified, or an unconventional moiety;
wherein each of (N)x and (N′)y is an oligonucleotide in which each consecutive N or N′ is joined to the next N or N′ by a covalent bond;
wherein Z and Z′ may be present or absent, but if present is independently 1-5 consecutive nucleotides covalently attached at the 3′ terminus of the strand in which it is present;
wherein z″ may be present or absent but if present is a capping moiety covalently attached at the 5′ terminus of (N′)y;
wherein x=18 to 27;
wherein y=18 to 27;
wherein (N)x comprises modified or unmodified ribonucleotides, and optionally at least one unconventional moiety;
wherein in (N′)y at least one unconventional moiety is present, which unconventional moiety may be an abasic ribose moiety, an abasic deoxyribose moiety, a modified or unmodified deoxyribonucleotide, a mirror nucleotide, a non-base pairing nucleotide analog or a nucleotide joined to an adjacent nucleotide by a 2′-5′ internucleotide phosphate bond; and
wherein the sequence of (N′)_{y} is a sequence substantially complementary to (N)x; and wherein the sequence of (N)ₓ comprises an antisense sequence substantially complementary to from about 18 to about 40 consecutive ribonucleotides in an mRNA of a target gene associated with an ear disorder.

[0221] In some embodiments x=y=19. In other embodiments x=y=23. In some preferred embodiments (N)x comprises modified and unmodified ribonucleotides, and at least one unconventional moiety.

[0222] In some embodiments in (N)x the N at the 3′ terminus is a modified ribonucleotide and (N)x comprises at least 8 modified ribonucleotides. In other embodiments at least 5 of the at least 8 modified ribonucleotides are alternating beginning at the 3′ end. In some embodiments (N)x comprises an abasic moiety in one of positions 5, 6, 7, 8, 9, 10, 11, 12, 13, 14 or 15.

[0223] In some embodiments the at least one unconventional moiety in (N′)y is present at positions 15, 16, 17, or 18. In some embodiments the unconventional moiety is selected from a mirror nucleotide, an abasic ribose moiety and an abasic deoxyribose moiety. In some preferred embodiments the unconventional moiety is a mirror nucleotide, preferably an L-DNA moiety. In some embodiments an L-DNA moiety is present at position 17, position 18 or positions 17 and 18. In other embodiments the at least one unconventional moiety in (N′)y is an abasic ribose moiety or an abasic deoxyribose moiety.

[0224] In yet another aspect the present invention provides a compound having Structure (K) set forth below:

| | | |
|---|---|---|
| (K) | 5′ (N)ₓ-Z 3′ | (antisense strand) |
| | 3′ Z′-(N′)_{y}-z″ 5′ | (sense strand) |

wherein each of N and N′ is a ribonucleotide which may be unmodified or modified, or an unconventional moiety;
wherein each of (N)x and (N′)y is an oligonucleotide in which each consecutive N or N′ is joined to the next N or N′ by a covalent bond;
wherein Z and Z′ may be present or absent, but if present is independently 1-5 consecutive nucleotides covalently attached at the 3′ terminus of the strand in which it is present;
wherein z″ may be present or absent but if present is a capping moiety covalently attached at the 5′ terminus of (N′)y;
wherein x=18 to 27;
wherein y=18 to 27;
wherein (N)x comprises a combination of modified or unmodified ribonucleotides and unconventional moieties, any modified ribonucleotide having a 2′-O-methyl on its sugar;
wherein (N′)y comprises modified or unmodified ribonucleotides and optionally an unconventional moiety, any modified ribonucleotide having a 2′OMe on its sugar;
wherein the sequence of (N′)_{y} is a sequence substantially complementary to (N)x; and wherein the sequence of (N)ₓ comprises an antisense sequence substantially complementary to from about 18 to about 40 consecutive ribonucleotides in an of a target gene associated with an ear disorder.

[0225] In some embodiments x=y=19. In other embodiments x=y=23. In some preferred embodiments the at least one preferred one unconventional moiety is present in (N)x and is an abasic ribose moiety or an abasic deoxyribose moiety. In other embodiments the at least one unconventional moiety is present in (N)x and is a non-base pairing nucleotide analog. In various embodiments (N′)y comprises unmodified ribonucleotides. In some embodiments (N)x comprises at least five abasic ribose moieties or abasic deoxyribose moieties or a combination thereof. In certain embodiments (N)x and/or (N′)y comprise modified ribonucleotides which do not base pair with corresponding modified or unmodified ribonucleotides in (N′)y and/or (N)ₓ.

[0226] In various embodiments the present invention provides an siRNA set forth in Structure (L):

| | | |
|---|---|---|
| (L) | 5′ (N)ₓ-Z 3′ | (antisense strand) |
| | 3′ Z′-(N′)_{y} 5′ | (sense strand) |

wherein each of N and N′ is a nucleotide selected from an unmodified ribonucleotide, a modified ribonucleotide, an unmodified deoxyribonucleotide and a modified deoxyribonucleotide;
wherein each of (N)ₓ and (N′)_{y} is an oligonucleotide in which each consecutive N or N′ is joined to the next N or N′ by a covalent bond;
wherein Z and Z′ are absent;
wherein x=y=19;
wherein in (N′)y the nucleotide in at least one of positions 15, 16, 17, 18 and 19 comprises a nucleotide selected from an abasic unconventional moiety, a mirror nucleotide, a deoxyribonucleotide and a nucleotide joined to an adjacent nucleotide by a 2′-5′ internucleotide bond;
wherein (N)x comprises alternating 2′OMe sugar modified ribonucleotides and unmodified ribonucleotides so as to have 2′OMe sugar modified ribonucleotide at the middle position of (N)x; and
wherein the sequence of (N′)_{y}, is a sequence substantially complementary to (N)x; and wherein the sequence of (N)ₓ comprises an antisense substantially complementary to from about 18 to about 40 consecutive ribonucleotides in an mRNA of a target gene associated with an ear disorder.

[0227] In some embodiments of Structure (L), in (N′)y the nucleotide in one or both of positions 17 and 18 comprises a modified nucleotide selected from an abasic unconventional moiety, a mirror nucleotide and a nucleotide joined to an adjacent nucleotide by a 2′-5′ internucleotide bond. In some embodiments the mirror nucleotide is selected from L-DNA and L-RNA. In various embodiments the mirror nucleotide is L-DNA.

[0228] In various embodiments (N′)y comprises a modified nucleotide at position 15 wherein the modified nucleotide is selected from a mirror nucleotide and a deoxyribonucleotide.

[0229] In certain embodiments (N′)y further comprises a modified nucleotide or pseudo nucleotide at position 2 wherein the pseudo nucleotide may be an abasic unconventional moiety and the modified nucleotide is optionally a mirror nucleotide.

[0230] In various embodiments the antisense strand (N)x comprises 2′O-Me modified ribonucleotides at the odd numbered positions (5′ to 3′; positions 1, 3, 5, 7, 9, 11, 13, 15, 17, 19). In some embodiments (N)x further comprises 2′O-Me modified ribonucleotides at one or both positions 2 and 18. In other embodiments (N)x comprises 2′O Me modified ribonucleotides at positions 2, 4, 6, 8, 11, 13, 15, 17, 19.

[0231] Other embodiments of Structures (L) are envisaged wherein x=y=21 or wherein x=y=23; in these embodiments the modifications for (N′)y discussed above instead of being in positions 17 and 18 are in positions 19 and 20 for 21-mer oligonucleotide and 21 and 22 for 23 mer oligonucleotide; similarly the modifications in positions 15, 16, 17, 18 or 19 are in positions 17, 18, 19, 20 or 21 for the 21-mer oligonucleotide and positions 19, 20, 21, 22, or 23 for the 23-mer oligonucleotide. The 2′O Me modifications on the antisense strand are similarly adjusted. In some embodiments (N)x comprises 2′O Me modified ribonucleotides at the odd numbered positions (5′ to 3; positions 1, 3, 5, 7, 9, 12, 14, 16, 18, 20 for the 21 mer oligonucleotide [nucleotide at position 11 unmodified] and 1, 3, 5, 7, 9, 11, 13, 15, 17, 19, 21, 23 for the 23 mer oligonucleotide [nucleotide at position 12 unmodified]. In other embodiments (N)x comprises 2′O Me modified ribonucleotides at positions 2, 4, 6, 8, 10, 12, 14, 16, 18, 20 [nucleotide at position 11 unmodified for the 21 mer oligonucleotide and at positions 2, 4, 6, 8, 10, 13, 15, 17, 19, 21, 23 for the 23 mer oligonucleotide nucleotide at position 12 unmodified].

[0232] In some embodiments (N′)y further comprises a 5′ terminal cap nucleotide. In various embodiments the terminal cap moiety is selected from an abasic unconventional moiety, an inverted abasic unconventional moiety, an L-DNA nucleotide, and a C6-imine phosphate (C6 amino linker with phosphate at terminus).

[0233] In other embodiments the present invention provides a compound having Structure (M) set forth below:

| | | |
|---|---|---|
| (M) | 5′ (N)ₓ-Z 3′ | (antisense strand) |
| | 3′ Z′-(N′)_{y} 5′ | (sense strand) |

wherein each of N and N′ is selected from a pseudo-nucleotide and a nucleotide;
wherein each nucleotide is selected from an unmodified ribonucleotide, a modified ribonucleotide, an unmodified deoxyribonucleotide and a modified deoxyribonucleotide;
wherein each of (N)ₓ and (N′)_{y} is an oligonucleotide in which each consecutive N or N′ is joined to the next N or N′ by a covalent bond;
wherein Z and Z′ are absent;
wherein x=18 to 27;
wherein y=18 to 27;
wherein the sequence of (N′)_{y} is a sequence substantially complementary to (N)x; and wherein the sequence of (N)ₓ comprises an antisense sequence substantially complementary to from about 18 to about 40 consecutive ribonucleotides in an mRNA of a target gene associated with an ear disorder.

[0234] In other embodiments the present invention provides a double stranded compound having Structure (N) set forth below:

| | | |
|---|---|---|
| (N) | 5′ (N)ₓ-Z 3′ | (antisense strand) |
| | 3′ Z′-(N′)_{y} 5′ | (sense strand) |

wherein each of N and N′ is a nucleotide selected from an unmodified ribonucleotide, a modified ribonucleotide, an unmodified deoxyribonucleotide and a modified deoxyribonucleotide;
wherein each of (N)ₓ and (N′)_{y} is an oligonucleotide in which each consecutive N or N′ is joined to the next Nor N′ by a covalent bond;
wherein Z and Z′ are absent;
wherein each of x and y is an integer between 18 and 40;
wherein the sequence of (N′)_{y} is a sequence substantially complementary to (N)x; and wherein the sequence of (N)ₓ comprises an antisense sequence substantially complementary to from about 18 to about 40 consecutive ribonucleotides in an antisense sequence to the mRNA of a target gene associated with an ear disorder;
wherein (N)x, (N′)y or (N)x and (N′)y comprise non base-pairing modified nucleotides such that (N)x and (N′)y form less than 15 base pairs in the double stranded compound.

[0235] In other embodiments the present invention provides a compound having Structure (O) set forth below:

| | | |
|---|---|---|
| (O) | 5′ (N)ₓ-Z 3′ | (antisense strand) |
| | 3′ Z′-(N′)_{y} 5′ | (sense strand) |

wherein each of N is a nucleotide selected from an unmodified ribonucleotide, a modified ribonucleotide, an unmodified deoxyribonucleotide and a modified deoxyribonucleotide;
wherein each of N′ is a nucleotide analog selected from a six membered sugar nucleotide, seven membered sugar nucleotide, morpholino moiety, peptide nucleic acid and combinations thereof;
wherein each of (N)ₓ and (N′)_{y} is an oligonucleotide in which each consecutive N or N′ is joined to the next N or N′ by a covalent bond;
wherein Z and Z′ are absent;
wherein each of x and y is an integer between 18 and 40;
wherein the sequence of (N′)_{y} is a sequence substantially complementary to (N)x; and wherein the sequence of (N)ₓ comprises an antisense sequence substantially complementary to from about 18 to about 40 consecutive ribonucleotides in an mRNA of a target gene associated with an ear disorder.

[0236] In other embodiments the present invention provides a compound having Structure (P) set forth below:

| | | |
|---|---|---|
| (P) | 5′ (N)ₓ-Z 3′ | (antisense strand) |
| | 3′ Z′-(N′)_{y} 5′ | (sense strand) |

wherein each of N and N′ is a nucleotide selected from an unmodified ribonucleotide, a modified ribonucleotide, an unmodified deoxyribonucleotide and a modified deoxyribonucleotide;
wherein each of (N)ₓ and (N′)_{y} is an oligonucleotide in which each consecutive N or N′ is joined to the next N or N′ by a covalent bond;
wherein Z and Z′ are absent;
wherein each of x and y is an integer between 18 and 40;
wherein one of N or N′ in an internal position of (N)x or (N′)y or one or more of N or N′ at a terminal position of (N)x or (N′)y comprises an abasic moiety or a 2′ modified nucleotide;
wherein the sequence of (N′)_{y} is a sequence substantially complementary to (N)x; and wherein the sequence of (N)ₓ comprises an antisense sequence substantially complementary to from about 18 to about 40 consecutive ribonucleotides in an mRNA of a target gene associated with an ear disorder.

[0237] In various embodiments (N′)y comprises a modified nucleotide at position 15 wherein the modified nucleotide is selected from a mirror nucleotide and a deoxyribonucleotide.

[0238] In certain embodiments (N′)y further comprises a modified nucleotide at position 2 wherein the modified nucleotide is selected from a mirror nucleotide and an abasic unconventional moiety.

[0239] In various embodiments the antisense strand (N)x comprises 2′O-Me modified ribonucleotides at the odd numbered positions (5′ to 3′; positions 1, 3, 5, 7, 9, 11, 13, 15, 17, 19). In some embodiments (N)x further comprises 2′O-Me modified ribonucleotides at one or both positions 2 and 18. In other embodiments (N)x comprises 2′O Me modified ribonucleotides at positions 2, 4, 6, 8, 11, 13, 15, 17, 19.

[0240] An additional novel molecule provided by the present invention is an oligonucleotide comprising consecutive nucleotides wherein a first segment of such nucleotides encode a first inhibitory RNA molecule, a second segment of such nucleotides encode a second inhibitory RNA molecule, and a third segment of such nucleotides encode a third inhibitory RNA molecule. Each of the first, the second and the third segment may comprise one strand of a double stranded RNA and the first, second and third segments may be joined together by a linker. Further, the oligonucleotide may comprise three double stranded segments joined together by one or more linker.

[0241] Thus, one molecule provided by the present invention is an oligonucleotide comprising consecutive nucleotides which encode three inhibitory RNA molecules; said oligonucleotide may possess a triple stranded structure, such that three double stranded arms are linked together by one or more linker, such as any of the linkers presented hereinabove. This molecule forms a “star”-like structure, and may also be referred to herein as RNAstar.

[0242] Said triple-stranded oligonucleotide may be an oligoribonucleotide having the general structure;

| | | |
|---|---|---|
| 5′ Oligo1 (sense) | LINKER A | Oligo2 (sense) 3′ |
| 3′ Oligo1 (antisense) | LINKER B | Oligo3 (sense) 5′ |
| 3′ Oligo3 (antisense) | LINKER C | Oligo2 (antisense) 5′ |
| or | | |
| 5′ Oligo1 (sense) | LINKER A | Oligo2 (antisense) 3′ |
| 3′ Oligo1 (antisense) | LINKER B | Oligo3 (sense) 5′ |
| 3′ Oligo3 (antisense) | LINKER C | Oligo2 (sense) 5′ |
| or | | |
| 5′ Oligo1 (sense) | LINKER A | Oligo3 (antisense) 3′ |
| 3′ Oligo1 (antisense) | LINKER B | Oligo2 (sense) 5′ |
| 5′ Oligo3 (sense) | LINKER C | Oligo2 (antisense) 3′ |

wherein one or more of linker A, linker B or linker C is present; any combination of two or more oligonucleotides and one or more of linkers A-C is possible, so long as the polarity of the strands and the general structure of the molecule remains. Further, if two or more of linkers A-C are present, they may be identical or different.

[0243] Thus, a triple-armed structure is formed, wherein each arm comprises a sense strand and complementary antisense strand (i.e. Oligo1 antisense base pairs to Oligo1 sense etc.). The triple armed structure may be triple stranded, whereby each arm possesses base pairing.

[0244] Further, the above triple stranded structure may have a gap instead of a linker in one or more of the strands. Such a molecule with one gap is technically quadruple stranded and not triple stranded; inserting additional gaps or nicks will lead to the molecule having additional strands. Preliminary results obtained by the inventors of the present invention indicate that said gapped molecules are more active in inhibiting certain target genes than the similar but non-gapped molecules. This may also be the case for nicked molecules.

[0245] According to one preferred embodiment of the invention, the antisense and the sense strands of the siRNA are phosphorylated only at the 3′-terminus and not at the 5′-terminus. According to another preferred embodiment of the invention, the antisense and the sense strands are non-phosphorylated. According to yet another preferred embodiment of the invention, the 5′ most ribonucleotide in the sense strand is modified to abolish any possibility of in vivo 5′-phosphorylation.

[0246] The invention further provides a vector capable of expressing any of the aforementioned oligoribonucleotides in unmodified form in a cell after which appropriate modification may be made. In preferred embodiment the cell is a mammalian cell, preferably a human cell.

### Pharmaceutical Compositions

[0247] The inventors of the present invention have overcome many of the obstacles in development of a composition for delivery of a therapeutic oligonucleotide to the middle and inner ear. Accordingly the present invention provides a pharmaceutical composition comprising one or more inhibitory oligonucleotide compounds; a permeability enhancer and a pharmaceutically acceptable vehicle or carrier. In some embodiments the composition comprises a mixture of two or more different oligonucleotides/siRNA compound.

[0248] A “penetration enhancer” or “permeability enhancer” includes a polyol such as polyethylene glycol (PEG), glycerol (glycerin), maltitol, sorbitol etc.; diethylene glycol monoethyl ether, azone, benzalkonium chloride (ADBAC), cetylperidium chloride, cetylmethylammonium bromide, dextran sulfate, lauric acid, menthol, methoxysalicylate, oleic acid, phosphatidylcholine, polyoxyethylene, polysorbate 80, sodium glycholate, sodium lauryl sulfate, sodium salicylate, sodium taurocholate, sodium taurodeoxycholate, sulfoxides, sodium deoxycholate, sodium glycodeoxycholate, sodium taurocholate and surfactants such as sodium lauryl sulfate, laureth-9, cetylpyridinium chloride and polyoxyethylene monoalkyl ethers, benzoic acids, such as sodium salicylate and methoxy salicylate, fatty acids, such as lauric acid, oleic acid, undecanoic acid and methyl oleate, fatty alcohols, such as octanol and nonanol, laurocapram, cyclodextrins, thymol, limonene, urea, chitosan and other natural and synthetic polymers.

[0249] Suitable polyols for inclusion in the solutions of the invention include glycerol and sugar alcohols such as sorbitol, mannitol or xylitol, polyethylene glycol and derivatives thereof. In some embodiments the composition further includes a preservative. Accepted preservatives such as benzalkonium chloride and disodium edetate (EDTA) are included in the compositions of the invention in concentrations sufficient for effective antimicrobial action, about 0.0001 to 0.1%, based on the weight of the composition.

[0250] The invention further provides a pharmaceutical composition comprising at least one compound of the invention covalently or non-covalently bound to one or more compounds of the invention in an amount effective to inhibit one or more genes as disclosed above; and a pharmaceutically acceptable carrier. In some embodiments the compound is processed intracellularly by endogenous cellular complexes to produce one or more oligoribonucleotides of the invention.

[0251] Additionally, the invention provides a method of inhibiting the expression of a target gene, by at least 50% as compared to a control, comprising contacting an mRNA transcript of the target gene with composition of the invention. In some embodiments an active siRNA compound inhibits gene expression at a level of at least 50%, 60% or 70% as compared to control. In certain preferred embodiments inhibition is at a level of at least 75%, 80% or 90% as compared to control. In some embodiments the target gene is a human gene as disclosed herein.

[0252] In one embodiment the oligoribonucleotide inhibits one or more of the genes as disclosed in the present invention, whereby the inhibition is selected from the group comprising inhibition of gene function, inhibition of polypeptide and inhibition of mRNA expression. In certain embodiments, the target gene is a viral, bacterial or mammalian gene. In various embodiments the target gene is a mammalian gene, preferably a human gene. In some embodiments the target gene having an mRNA selected from any one of SEQ ID NO: 1-SEQ ID NO:36.

[0253] In one embodiment the compound inhibits expression of a polypeptide encoded by a target gene whereby the inhibition is selected from the group comprising inhibition of function (which may be examined by an enzymatic assay or a binding assay with a known interactor of the native gene/polypeptide, inter alia), inhibition of protein (which may be examined by Western blotting, ELISA or immuno-precipitation, inter ado) and inhibition of mRNA expression (which may be examined by Northern blotting, quantitative RT-PCR, in-situ hybridisation or microarray hybridisation, inter alia).

[0254] In additional embodiments the invention provides a method of treating a subject suffering from a disease accompanied by an elevated level a gene of the present invention, the method comprising administering to the subject a compound of the invention in a therapeutically effective dose thereby treating the subject.

### Delivery

[0255] The siRNA molecules of the present invention is delivered to the ear by direct application of pharmaceutical composition to the outer ear. In some embodiments the pharmaceutical composition is applied to the ear canal. Delivery to the ear may also be refereed to as aural or otic delivery comprising siRNA; a penetration enhancer and a pharmaceutically acceptable vehicle.

[0256] In some embodiments the siRNA molecules of the invention are delivered in liposome or lipofectin formulations and the like and can be prepared by methods well known to those skilled in the art. Such methods are described, for example, in U.S. Pat. Nos. 5,593,972, 5,589,466, and 5,580,859, which are herein incorporated by reference.

[0257] Delivery systems aimed specifically at the enhanced and improved delivery of siRNA into mammalian cells have been developed, (see, for example, Shen et al FEBS Let. 2003, 539:111-114; Xia et al., Nat. Biotech. 2002, 20:1006-1010; Reich et al., Mol. Vision. 2003, 9: 210-216; Sorensen et al., J. Mol. Biol. 2003, 327: 761-766; Lewis et al., Nat. Gen. 2002, 32: 107-108 and Simeoni et al., NAR 2003, 31, 11: 2717-2724). siRNA has recently been successfully used for inhibition of gene expression in primates (see for example. Tolentino et al., Retina 24(4):660.

[0258] The “therapeutically effective dose” for purposes herein is thus determined by such considerations as are known in the art. The dose must be effective to achieve improvement including but not limited to improved survival rate or more rapid recovery, or improvement or elimination of symptoms and other indicators as are selected as appropriate measures by those skilled in the art.

[0259] In general, the active dose of compound for humans is in the range of from 1 ng/kg to about 20-100 mg/kg body weight per day, preferably about 0.01 mg to about 2-10 mg/kg body weight per day, in a regimen of one dose per day or twice or three or more times per day for a period of 1-4 weeks or longer. In various embodiments the siRNA is chemically modified to increase stability, increase activity, reduce off target effects, and or to reduce innate immune stimulation. Dosage to the ear is determined, inter alia, by the activity of the oligonucleotide, the indication and the severity of the disorder and comprises administering a dose of about 0.1 ng to about 10 mg, about 1 ng to about 1 mg, or about 10 ng to about 1 mg, total oligonucleotide in pharmaceutically acceptable agent. The concentration of siRNA in the composition is between 0.1 mg/ml to 100 mg/ml, preferably between 1 mg/ml to 100 mg/ml, and more preferably between 5 mg/ml to 20 mg/ml.

[0260] The compounds of the present invention are administered by topical administration. It should be noted that the compound can be administered as the compound or as pharmaceutically acceptable salt and can be administered alone or as an active ingredient in combination with pharmaceutically acceptable carriers, solvents, diluents, excipients, adjuvants and vehicles. The compounds are administered as eardrops, ear cream, ear ointment, foam, mousse or any of the above in combination with a delivery device. Implants of the compounds are also useful. Liquid forms are prepared as drops. The liquid compositions include aqueous solutions, with and without organic co-solvents, aqueous or oil suspensions, emulsions with edible oils, as well as similar pharmaceutical vehicles. In another embodiment the administration comprises non-invasive topical or local administration. Eardrops may also be referred to as otic drops or aural drops. In a preferred embodiment, the ear drops remain in the ear canal for about 30 min in order to prevent leakage of the drops out of the canal. It is thus preferable that the subject receiving the drops keep his head on the side with the treated ear facing upward to prevent leakage of the drop out of the canal.

[0261] In preferred embodiments the subject being treated is a warm-blooded animal and, in particular, mammals including human.

### Methods of Treatment

[0262] In another aspect, the present invention relates to a method for the treatment of a subject in need of treatment for an ear disease or disorder associated with the abnormal expression of a target gene, comprising administering to the subject an amount of an oligonucleotide which reduces or inhibits expression of a target gene associated with the ear disorder in a pharmaceutical composition comprising the oligonucleotide, a permeability enhancer and a pharmaceutically acceptable carrier. In some embodiments the target gene is listed in Table 1. In a preferred embodiment, the target gene is selected from one or more of: TP53BP2 (ASPP2), BNIP3, CASP2, NOX3, HRK, RAC1, DDIT4, DDIT4L, NOX4, HTRA2, CAPNS1 (Calpain), ID3, HES1, HES5, CDKN1B and ID3.

[0263] In preferred embodiments the subject being treated is a warm-blooded animal and, in particular, mammals including human.

[0264] The methods of the invention comprise administering to the subject a pharmaceutical composition comprising one or more inhibitory compounds which down-regulate expression of a gene associated with an ear disorder; and a pharmaceutically acceptable vehicle, in a therapeutically effective dose so as to thereby treat the subject.

[0265] The term “treatment” refers to both therapeutic treatment and prophylactic or preventative measures, wherein the object is to prevent or slow down (lessen) the ear disorder. Those in need of treatment include those already experiencing the disease or condition, those prone to having the disease or condition, and those in which the disease or condition is to be prevented. The compounds of the invention may be administered before, during or subsequent to the onset of the disease or condition or symptoms associated therewith. In cases where treatment is for the purpose of prevention, then the present invention relates to a method for delaying the onset of or averting the development of the disease or disorder. In some embodiments the method comprises administering eardrops which are warmed to 35° C. to about 38° C. to the subject's ear. In some embodiments the method of comprises administering the composition of the present invention unilaterally, e.g. to one of the subject's ear. In various embodiments the composition is allowed to penetrate the subject's ear for about 5 minutes to about 60 minutes.

[0266] One aspect of the present invention relates to combination therapy. The active ingredients that comprise a combination therapy may be administered together via a single dosage form or by separate administration of each active agent. In some embodiments the combination therapy comprises administering to a subject in need thereof a composition according to the present invention and an ototoxin. For example, the present invention is directed to an improved method for treatment of hearing loss in a mammal comprising co-administering to the mammal an ototoxin and a therapeutically effective amount of one or more compounds of the present invention. Ototoxic agents include cisplatin and cisplatin-like compounds, aminoglycosides, loop diuretics, and hydroquinone and their analogs.

[0267] Co-administration comprises administering two or more agents, each of which is formulated and administered separately, or by administering two or more agents in a single formulation. While the two or more agents can be administered simultaneously, they need not be. For example, administration of a first agent (or combination of agents) can precede administration of a second agent (or combination of agents) by minutes, hours, days, or weeks. Thus, the two or more agents can be administered within minutes of each other or within any number of hours of each other or within any number or days or weeks of each other. In some cases even longer intervals are possible.

[0268] Methods, molecules and compositions, which inhibit the genes of the invention, are discussed herein at length, and any of said molecules and/or compositions may be beneficially employed in the treatment of a subject suffering from any of said conditions.

[0269] The present invention also provides for a process of preparing a pharmaceutical composition, which comprises:

providing one or more compounds of the invention; and
admixing said compound with a pharmaceutically acceptable carrier.

[0270] The present invention also provides for a process of preparing a pharmaceutical composition, which comprises admixing one or more compounds of the present invention with a pharmaceutically acceptable carrier.

[0271] In a preferred embodiment, the compound used in the preparation of a pharmaceutical composition is admixed with a carrier in a pharmaceutically effective dose. In a particular embodiment the compound of the present invention is conjugated to a steroid or to a lipid or to another suitable molecule e.g. to cholesterol.

### Oligonucleotide Synthesis

[0272] The compounds of the present invention can be synthesized by any of the methods that are well-known in the art for synthesis of ribonucleic (or deoxyribonucleic) oligonucleotides. Such synthesis is, among others, described in Beaucage and Iyer, Tetrahedron 1992; 48:2223-2311: Beaucage and Iyer. Tetrahedron 1993; 49: 6123-6194 and Caruthers, et. al., Methods Enzymol. 1987; 154: 287-313; the synthesis of thioates is, among others, described in Eckstein, Annu. Rev. Biochem. 1985; 54: 367-402, the synthesis of RNA molecules is described in Sproat, in Humana Press 2005 edited by Herdewijn P.; Kap. 2: 17-31 and respective downstream processes are, among others, described in Pingoud et. al., in IRE Press 1989 edited by Oliver R. W. A.; Kap. 7: 183-208.

[0273] Other synthetic procedures are known in the art e.g. the procedures as described in Usman et al., J. Am. Chem. Soc., 1987, 109:7845; Scaringe et al., NAR, 1990, 18:5433; Wincott et al., NAR 1995, 23:2677-2684; and Wincott et al., Methods Mol. Bio., 1997, 74:59, and these procedures may make use of common nucleic acid protecting and coupling groups, such as dimethoxytrityl at the 5′-end, and phosphoramidites at the 3′-end. The modified (e.g. 2′-O-methylated) nucleotides and unmodified nucleotides are incorporated as desired.

[0274] The oligonucleotides of the present invention can be synthesized separately and joined together post-synthetically, for example, by ligation (Moore et al., Science 1992, 256:9923; International Patent Publication No. WO 93/23569; Shabarova et al., NAR 1991, 19:4247; Bellon et al., Nucleosides & Nucleotides, 1997, 16:951; Bellon et al., Bioconjugate Chem 1997, 8:204), or by hybridization following synthesis and/or deprotection.

[0275] It is noted that a commercially available machine (available, inter alia, from Applied Biosystems) can be used; the oligonucleotides are prepared according to the sequences disclosed herein. Overlapping pairs of chemically synthesized fragments can be ligated using methods well known in the art (e.g., see U.S. Pat. No. 6,121,426). The strands are synthesized separately and then are annealed to each other in the tube. Then, the double-stranded siRNAs are separated from the single-stranded oligonucleotides that were not annealed (e.g. because of the excess of one of them) by HPLC. In relation to the siRNAs or siRNA fragments of the present invention, two or more such sequences can be synthesized and linked together for use in the present invention.

[0276] The compounds of the invention can also be synthesized via tandem synthesis methodology, as described for example in US Patent Publication No. 2004/0019001 (McSwiggen), wherein both siRNA strands are synthesized as a single contiguous oligonucleotide fragment or strand separated by a cleavable linker which is subsequently cleaved to provide separate siRNA fragments or strands that hybridize and permit purification of the siRNA duplex. The linker can be a polynucleotide linker or a non-nucleotide linker.

[0277] The present invention further provides for a pharmaceutical composition comprising two or more siRNA molecules for the treatment of any of the diseases and conditions mentioned herein, whereby said two molecules may be physically mixed together in the pharmaceutical composition in amounts which generate equal or otherwise beneficial activity, or may be covalently or non-covalently bound, or joined together by a nucleic acid linker of a length ranging from 2-100, preferably 2-50 or 2-30 nucleotides.

[0278] Thus, the siRNA molecules may be covalently or non-covalently bound or joined by a linker to form a tandem siRNA compound. Such tandem siRNA compounds comprising two siRNA sequences are typically about 38-150 nucleotides in length, more preferably 38 or 40-60 nucleotides in length, and longer accordingly if more than two siRNA sequences are included in the tandem molecule. A longer tandem compound comprised of two or more longer sequences which encode siRNA produced via internal cellular processing, e.g., long dsRNAs, is also envisaged, as is a tandem molecule encoding two or more shRNAs. Such tandem molecules are also considered to be a part of the present invention. A tandem compound comprising two or more siRNAs sequences of the invention is envisaged.

[0279] An siRNA molecule that targets a gene associated with an ear disorder may be the main active component in a pharmaceutical composition, or may be one active component of a pharmaceutical composition containing two or more siRNAs (or molecules which encode or endogenously produce two or more siRNAs, be it a mixture of molecules or one or more tandem molecules which encode two or more siRNAs), said pharmaceutical composition further being comprised of one or more additional siRNA molecule which targets one or more additional gene. Simultaneous inhibition of said additional gene(s) will likely have an additive or synergistic effect for treatment of the diseases disclosed herein.

[0280] Additionally, the siRNA disclosed herein or any nucleic acid molecule comprising or encoding such siRNA can be linked or bound (covalently or non-covalently) to antibodies (including aptamer molecules) against cell surface internalizable molecules expressed on the target cells, in order to achieve enhanced targeting for treatment of the diseases disclosed herein. For example, anti-Pas antibody (preferably a neutralizing antibody) may be combined (covalently or non-covalently) with any other siRNA.

[0281] The compounds of the present invention can be delivered for example as double stranded compounds, as double stranded hairpin compounds or as tandem compounds. It is also envisaged that a long oligonucleotide (typically 25-500 nucleotides in length) comprising one or more stem and loop structures, where stem regions comprise the sequences of the oligonucleotides of the invention, may be delivered in a carrier, preferably a pharmaceutically acceptable carrier, and may be processed intracellularly by endogenous cellular complexes (e.g. by DROSHA and DICER as described above) to produce one or more smaller double stranded oligonucleotides (siRNAs) which are oligonucleotides of the invention. This oligonucleotide can be termed a tandem shRNA construct. It is envisaged that this long oligonucleotide is a single stranded oligonucleotide comprising one or more stem and loop structures, wherein each stem region comprises a sense and corresponding antisense siRNA sequence of the genes of the invention. In particular, it is envisaged that this oligonucleotide comprises an antisense sequence (N)ₓ relative to the mRNA transcribed from a mammalian gene selected from the group set forth in Table 1. In a preferred embodiment, the target gene is selected from one or more of: TP53BP2 (ASPP2), BNIP3, CASP2, NOX3, HRK, RAC1, DDIT4, DDIT4L, NOX4, HTRA2, CAPNS1 (Calpain), ID3, HES1, HES5, CDKN1B and ID3.

[0282] A number of PCT applications have recently been published that relate to the RNAi phenomenon. These include: PCT publication WO 00/44895; PCT publication WO 00/49035; PCT publication WO 00/63364; PCT publication WO 01/36641; PCT publication WO 01/36646; PCT publication WO 99/32619; PCT publication WO 00/44914; PCT publication WO 01/29058; and PCT publication WO 01/75164.

[0283] RNA interference (RNAi) is based on the ability of dsRNA species to enter a cytoplasmic protein complex, where it is then targeted to the complementary cellular RNA and specifically degrade it. The RNA interference response features an endonuclease complex containing an siRNA, commonly referred to as an RNA-induced silencing complex (RISC), which mediates cleavage of single-stranded RNA having a sequence complementary to the antisense strand of the siRNA duplex. Cleavage of the target RNA may take place in the middle of the region complementary to the antisense strand of the siRNA duplex (Elbashir et al., Genes Dev., 2001, 15(2):188-200). In more detail, longer dsRNAs are digested into short (17-29 bp) dsRNA fragments (also referred to as short inhibitory RNAs, “siRNAs”) by type III RNAses (DICER, DROSHA, etc.; Bernstein et al., Nature, 2001, 409(6818):363-6; Lee et al., Nature, 2003, 425(6956):415-9). The RISC protein complex recognizes these fragments and complementary mRNA. The whole process is culminated by endonuclease cleavage of target mRNA (McManus & Sharp, Nature Rev Genet, 2002, 3(10):737-47; Paddison & Hannon, Curr Opin Mol. Ther. 2003, 5(3):217-24). (For additional information on these terms and proposed mechanisms, see for example Bernstein et al., RNA 2001, 7(11):1509-21; Nishikura, Cell 2001, 107(4):415-8 and PCT publication WO 01/36646).

[0284] Several groups have described the development of DNA-based vectors capable of generating siRNA within cells. The method generally involves transcription of short hairpin RNAs that are efficiently processed to form siRNAs within cells (Paddison et al. PNAS USA 2002, 99:1443-1448; Paddison et al. Genes & Dev 2002, 16:948-958; Sui et al, PNAS USA 2002, 8:5515-5520; and Brummelkamp et al. Science 2002, 296:550-553). These reports describe methods to of generate generating siRNAs capable of specifically targeting numerous endogenously and exogenously expressed genes.

[0285] The invention has been described in an illustrative manner, and it is to be understood that the terminology used is intended to be in the nature of words of description rather than of limitation.

[0286] Obviously, many modifications and variations of the present invention are possible in light of the above teachings. It is, therefore, to be understood that within the scope of the appended claims, the invention can be practiced otherwise than as specifically described. Throughout this application, various publications, including United States patents, are referenced by author and year and patents by number. The disclosures of these publications and patents and patent applications in their entireties are hereby incorporated by reference into this application in order to more fully describe the state of the art to which this invention pertains.

[0287] The present invention is illustrated in detail below with reference to examples, but is not to be construed as being limited thereto.

[0288] Citation of any document herein is not intended as an admission that such document is pertinent prior art, or considered material to the patentability of any claim of the present application. Any statement as to content or a date of any document is based on the information available to applicant at the time of filing and does not constitute an admission as to the correctness of such a statement.

### EXAMPLES

[0289] Without further elaboration, it is believed that one skilled in the art can, using the preceding description, utilize the present invention to its fullest extent. The following preferred specific embodiments are, therefore, to be construed as merely illustrative, and not limitative of the claimed invention in any way.

### Material and Methods: General

[0290] Standard molecular biology protocols known in the art not specifically described herein are generally followed essentially as in Sambrook et al., Molecular cloning: A laboratory manual, Cold Springs Harbor Laboratory, New-York (1989, 1992), and in Ausubel et al., Current Protocols in Molecular Biology, John Wiley and Sons, Baltimore, Md. (1988), and as in Ausubel et al., Current Protocols in Molecular Biology, John Wiley and Sons, Baltimore, Md. (1989) and as in Perbal, A Practical Guide to Molecular Cloning, John Wiley & Sons, New York (1988), and as in Watson et al., Recombinant DNA, Scientific American Books, New York and in Birren et al (eds) Genome Analysis: A Laboratory Manual Series, Vols. 1-4 Cold Spring Harbor Laboratory Press, New York (1998) and methodology as set forth in U.S. Pat. Nos. 4,666,828; 4,683,202; 4,801,531; 5,192,659 and 5,272,057 and incorporated herein by reference. Polymerase chain reaction (PCR) was carried out generally as in PCR Protocols: A Guide To Methods And Applications, Academic Press, San Diego, Calif. (1990). In situ (In cell) PCR in combination with Flow Cytometry can be used for detection of cells containing specific DNA and mRNA sequences (Testoni et al., Blood 1996, 87:3822.) Methods of performing RT-PCR are also well known in the art.

### Cell Culture:

[0291] HeLa cells (American Type Culture Collection) were cultured as described in Czauderna, et al. (NAR, 2003, 31:670-82). Human keratinocytes were cultured at 37° C. in Dulbecco's modified Eagle medium (DMEM) containing 10% FCS. The mouse cell line, B16V (American Type Culture Collection), was cultured at 37° C. in Dulbecco's modified Eagle medium (DMEM) containing 10% FCS. Culture conditions were as described in (Methods Find Exp Clin Pharmacol. 1997 May; 19(4):231-9). In each case, the cells were subject to the experiments as described herein at a density of about 50,000 cells per well and the double-stranded nucleic acid according to the present invention was added at 20 nM, whereby the double-stranded nucleic acid was complexed using 1 μg/ml of a proprietary lipid as described below.

### Induction of Hypoxia-Like Conditions:

[0292] Where required, cells were treated with CoCl₂ for inducing a hypoxia-like condition as follows: siRNA transfections were carried out in 10-cm plates (30-50% confluency) as described by Czanderna et al., 2003; Kretschmer et al., 2003. Briefly, siRNA were transfected by adding a preformed 10× concentrated complex of GB and lipid in serum-free medium to cells in complete medium. The total transfection volume was 10 ml. The final lipid concentration was 1.0 μg/ml; the final siRNA concentration was 20 nM unless otherwise stated. Induction of the hypoxic responses was carried out by adding CoCl₂ (100 μM) directly to the tissue culture medium 24 h before lysis.

### Preparation of Cell Extracts and Immuno Blotting

[0293] The preparation of cell extracts and immuno blot analysis were carried out essentially as described (Klippel et al. Mol Cell Biol, 1998. 18:5699-711; Klippel, A., et al., Mol Cell Biol, 1996. 16:4117-27).

### Example 1

### In Vitro Testing of siRNA Compounds

[0294] About 1.5-2×10⁵ tested cells (HeLa cells and/or 2931 cells for siRNA targeting human genes and NRK52 cells and/or NMUMG cells for siRNA targeting the rat/mouse gene) were seeded per well in a 6 well plate (70-80% confluent).

[0295] 24 hours later, cells were transfected with siRNA compounds using the Lipofectamine™ 2000 reagent (Invitrogen) at final concentrations of 5 nM or 20 nM. The cells were incubated at 37° C. in a CO₂ incubator for 72 hours.

[0296] As positive control for transfection PTEN-Cy3 labeled siRNA compounds were used. An additional positive control used was a blunt-ended 19-mer siRNA, i.e. x=y=19 wherein Z and Z′ are both absent. This siRNA was non-phosphorylated and had alternating ribonucleotides modified at the 2′ position of the sugar residue in both the antisense and the sense strands, wherein the moiety at the 2′ position is methoxy (2′OMe) and wherein the ribonucleotides at the 5′ and 3′ termini of the antisense strand are modified in their sugar residues, and the ribonucleotides at the 5′ and 3′ termini of the sense strand are unmodified in their sugar residues.

[0297] As negative control for siRNA activity GFP siRNA compounds were used.

[0298] At 72 hours after transfection the cells were harvested and RNA is extracted from the cells. Transfection efficiency was tested by fluorescent microscopy.

[0299] The percent of inhibition of gene expression using specific preferred siRNA structures is determined using qPCR analysis of a target gene in cells expressing the endogenous gene. In general, the siRNAs having specific sequences that were selected for in vitro testing were specific for human and a second species such as rat or rabbit genes. In some examples, similar results are obtained using siRNAs having these RNA sequences and modified as described herein. The siRNA oligomers tested herein are selected from siRNA compounds comprising oligonucleotides in FIG. 4, from Tables B of U.S. Ser. No. 11/978,089, which are hereby incorporated by reference in their entirety and are set forth as SEQ ID NOS:97-68654. The siRNA oligomers tested herein are also disclosed in U.S. Ser. Nos. or PCT application Ser. Nos. 11/207,119, 11/811,112, 11/655,636, PCT/IL2008/000797, PCT/IL2008/000874, PCT/IL2009/000053, PCT/IL2009/000302 which are hereby incorporated by reference in their entirety.

### Example 2

### Middle/Inner Ear Delivery Routes of Cy3 Labelled DDIT4_{—}1 siRNA

[0300] The objectives of the study were as follows: To establish procedures for topical, non-invasive delivery of a therapeutic oligonucleotide to the middle/inner ear.

[0301] To estimate the temporal pattern of distribution of siRNA DDIT4-Cy3 into cochlear structures, following instillation of pharmaceutical compositions into right external auditory canal in rats (REAC).

[0302] The substance tested was Cy3-labeled siRNA against RTP801 (DDIT4_{—}1-Cy3) (sense strand: GUGCCAACCUGAUGCAGCU; antisense strand: AGCUGCAUCAGGUUGGCAC).

[0303] Description of the test material: double-stranded Cy3-labeled 19-mer siRNA, Cy3 is linked to the 3′ end of the antisense strand via a dT nucleotide. Both sense and anti-sense strands harbor alternating 2′-OMe modifications on every odd nucleotide of the anti-sense strand and on every even nucleotide of the sense strand. Under sterile conditions, 42.43 mg of DD1T4_{—}1-Cy3 powder (BioSpring) were dissolved in 2.1 ml of sterile double distilled water, to achieve clear 20 mg/ml (1.5 mM) solution. The solution was stored at −80° C. until use. Formulated (formulated compound) sterile 10 mg/ml Cy3DDIT4_{—}1 in 20% sterile glycerol solution in pyrogen free water.

[0304] Control Article(s) (including positive/negative controls and vehicle)

[0305] Vehicle—20% sterile glycerol solution in pyrogen free water.

[0306] Test system: Male rats, 10-14 weeks old, weighing 200-220 gr

[0307] Experimental design: The study included 5 experimental groups as described in Table 2, below: Experimental groups I-IV (treated with siRNA (DDIT4_{—}1-Cy3) glycerol based eardrop/3 rats/time point) and group V (a; b and c)-3 rats/time point (20% glycerol treated control group). Rats were treated with a single siRNA (DD1T4_{—}1-Cy3) glycerol based or 20% glycerol only eardrop (warmed to 37° C.; only one ear treated: a.d.=aurio dexrta=right ear (right external auditory canal: REAC)/a.s. aurio sinister left ear was used as non-treated control) as follows:

[0308] Groups I-IV: dose regime: 100 μg/10 μl/ear of 20% glycerol/time point, administration route: REAC 3 rats per time point.

[0309] Group V (a-c): REAC 10 μl 20% glycerol only treated control.

TABLE 2
Study Design

| | | | | | Time | |
|---|---|---|---|---|---|---|
| | SiRNA | Dose | Volume | | point | Group |
| Group | Type | μg/rat | (μl) | Route | (Days) | Size |
| I | DDIT4_1-Cy3 | 100 μg | 10.00 | REAC | 1 | 3 |
| II | DDIT4_1-Cy3 | 100 μg | 10.00 | REAC | 3 | 3 |
| III | DDIT4_1-Cy3 | 100 μg | 10.00 | REAC | 7 | 3 |
| IV | DDIT4_1-Cy3 | 100 μg | 10.00 | REAC | 14 | 3 |
| V | Glycerol 20% | none | 10.00 | REAC | 3; 7; 14 | 3 × 3 |
| (a, b, c) | | | | | | |

[0310] Preparation of test and control articles for administration: One (1) ml of 100% glycerol with 4 ml pyrogen free water, were mixed by inversion for no less than 30 minutes.

[0311] Anesthesia: Rats were anesthetized with Equithesine 4 ml/kg body weight.

[0312] Right external auditory canal (REAC) delivery: A 10 μl sample volume (warm glycerol based eardrops, 37° C.) was slowly instilled into external REAC, using blunt pipette tip. This volume was delivered into each right ear (groups I-IV according study design). During and after REAC instillations, rats were observed and returned to cage after regaining consciousness.

[0313] Scheduled euthanasia: Rats from all groups were euthanized according to the study design (Table 2, Time points termination).

[0314] Termination step: was accomplished by cardiac puncture and blood collection; collected serum/plasma was stored (20° C.) for further siRNA blood detection analysis (back up).

[0315] Tissue Collection: Rats were sacrificed. Left and right temporal bones including cochlea were gently harvested from all animals; and bony cochlea were prepared and proceed for cryosections as described below.

### Tissue Embedding Protocol for Cryosections

[0316] Perforated bony cochlea: the cochlear apical end of the cochlear capsule was placed in fixative: 4% PFA in PBS pH 7.2-7.4 and incubated at room temperature 1.5 h with rotation on a rotator. The samples were washed 3×5 mill with PBS with rotation. The bony cochlea was decalcified in 10% EDTA/PBS pH 7.2-7.4 overnight or longer at 4° C. with rotation. Decalcification was determined by gently pressing on the bony cochlea with a forceps/syringe needles. If decalcification required more time, the decalcification solution (fresh 10% EDTA in PBS) was changed.

[0317] For the infiltration step: stock solutions of 10% and 30% sucrose in PBS were prepared. The tissue was rinsed 2×5 min in PBS, pH 7.2-7.4, followed by washing 30 min in 10% sucrose, at room with rotation on the tissue rotator. The tissue was washed 30 min in a 2:1 solution of 10:30% sucrose at of the room temperature with rotation, followed by a 30 min wash in a 1:1 solution of 10:30% sucrose at room temperature with rotation, then in a 1:2 solution of 10:30% sucrose at room temperature with rotation for 30 min, and finally at 4° C. in 30% sucrose with rotation, overnight.

[0318] The cochleae were transferred into tubes with degassed OCT (30 min in desiccator) and the vials maintained at 4° C. overnight with rotation.

[0319] The cochleae were placed in the OCT and oriented by aligning an imaginary plane through the modiolus parallel with the bottom of the embedding mold, followed by placement in cryostat for cryosectioning.

### Evaluation:

[0320] Delivery of siRNA was evaluated using fluorescent microscopy and digital imaging. A tissue fragments (cochlea) will be considered positive (i.e., a successful Cy3 DDIT4_{—}1 siRNA transfer incorporation occurred) only if histological (microscopic) examination showed clear fluorescence signal within specific cochlear structures. Background DAPI staining was assisted in identification of cochlea tissue (anatomical or topographical) structure. Inner ear delivery was considered positive if histological examination showed consistency within the group (i.e. time points, time course etc).

[0321] FIG. 1 shows the delivery of Cy3-labelled DDIT4 siRNA into the spiral ganglion (ganglion of Corti) in the apical turn of the organ of Corti following application of ear drops containing Cy3-labelled siRNA formulated in 20% glycerol. Upper panel is X40 magnification of phalloidin-labelled cells (left panel), bright field (BF, right panel) and the merge thereof (middle panel, M). Bottom panel is X60 magnification of phalloidin-labelled cells (left panel), bright field (BF, right panel) and the merge thereof (middle panel, M). Three days after eardrop application (100 ug in 10 ul of 20% glycerol of Cy3-labeled DDIT4 siRNA) the rats were perfused with 4% PFA. Temporal bones were removed and the bony cochleae were dissected. Whole mount Corti were prepared with Alexa488 labelled phalloidin which binds to actin filaments. Delivery of siRNA was evaluated using confocal microscopy and digital imaging. A tissue fragment was considered positive (i.e., a successful Cy3 DDIT4 siRNA transfer intracellular incorporation occurred) only where histological (microscopic) examination showed clear fluorescence signal within specific cells or structures.

[0322] FIG. 2 shows the delivery of Cy3 labelled DDIT4 siRNA in three rows of outer hair cells, inner hair cells and supporting cells in basic, second and apical turns of organ of Corti. The delivery of Cy3 labelled DDIT4 siRNA was determined three days after eardrop application (100 ug in 10 ul of 20% glycerol of Cy3-labeled DDIT4 siRNA).

[0323] FIG. 3 shows the delivery of Cy3 labelled DDIT4 siRNA into the rat auditory epithelium. Top panel is dissected rat bony cochlea (perfused with 4% PFA). Bottom panel demonstrates the delivery of Cy3 labelled DDIT4 siRNA into the basic, second and apical turns of the auditory epithelium.

### Example 3

### Examination of Inner Ear Non-Invasive Delivery of Formulated Cy3-DDIT4_{—}1 siRNA in Rats

[0324] Description of the test material: double-stranded Cy3-labeled 19-mer DDIT4_{—}1 siRNA, Cy3 is linked to the 3′ end of the antisense strand via an extra ‘dT’ nucleotide. Both sense and anti-sense strands harbor alternating 2′OMe sugar modified ribonucleotides on every odd nucleotide of the antisense strand and on every even nucleotide of the sense strand.

[0325] Three different formulations were tested:

[0326] Formulation 1: 100 μg of Cy3 DDIT4 siRNA in 10 μl of 30% glycerol.

[0327] Formulation 2: 100 μg of Cy3 DDIT4 siRNA in 10 μl of PBS.

[0328] Formulation 3: 100 μg of Cy3 DDIT4 siRNA in 10 μl of 20% mineral oil (v/v), 40% Propylene glycol (v/v) and 10% Ethanol (v/v).

[0329] Right external auditory canal (REAC) delivery: A 10 μl sample volume (warm formulated eardrops, 37° C.) was slowly instilled into external REAC, using blunt pipette tip. This volume was delivered into the right ear. During and after REAC instillations, rats were kept on contralateral side for 40 minutes and returned to its cage following recovery.

[0330] Tissue Collection: Rats were decapitated. Both temporal bones were gently harvested from all animals and postfixed for additional 1 hour in 10% neutral buffered formalin. Thereafter the bony cochlea was dissected, followed by Alexa488-phalloidin immunostaining and whole mount organ of Corti preparation and contra stained with DAPI stain.

[0331] Delivery of siRNA was evaluated using fluorescence microscopy and digital imaging. Tissue fragments (organ of Corti) were considered positive (i.e., a successful Cy3 DDIT4_{—}1 siRNA delivery occurred) only if histological (microscopic) examination showed clear fluorescent signal within specific cochlea's structures. Background DAPI staining was used for the identification of cochlea tissue structure. Inner ear delivery was considered positive if histological examination had consistency within all turns of organ of Corti (basal, second and apical).

[0332] Results: Positive siRNA delivery into the inner ear cochlear structures was detected following application of 30% glycerol (Formulation 1) or 20% mineral oil (v/v), 40% Propylene glycol (v/v) and 10% Ethanol (v/v) (Formulation 3) using ear drops. All turns of organ of Corti and spiral ganglions were labeled at the amount of 100 μg, however the signal with the mineral oil formulation was weaker than the glycerol formulation.

### Example 4

### QM5 siRNA Treatment in Ear Drops Induced Knockdown of p53 Protein Expression Levels in the Rat Inner Ear After Cisplatin Administration

[0333] The objective of this experiment was to evaluate the knockdown of Cisplatin induced p53 protein in the inner ear (Cochlea) of rats that were treated with eardrops contain QM5 siRNA (rat siRNA targeting rat p53).

[0334] Experimental group I: was treated once with QM5 siRNA (sense strand: GAAGAAAAUUUCCGCAAAA: antisense strand: UUUUGCGGAAAUUUUCUUC): at a dose of 100 μg/30% Glycerol/10 μl, delivered by the eardrops (ErD), route: REAC; QM5 siRNA treatment was performed on day 1, prior to the 1st Cisplatin administration. The contra lateral ear (Left), serves as untreated control. QM5 siRNA is designed as alternating ribonucleotides modified at the 2′ position of the sugar residue in both the antisense and the sense strands, wherein the moiety at the 2′ position is methoxy (2′OMe sugar modified).

### Experimental Group II: Untreated Normal Control Rats

### Experiment Design:

| | Treatment | | | | |
|---|---|---|---|---|---|
| | QM5 siRNA | Delivery | Cisplatin | | |
| | 100 μg/10 μl | route | I.P. dose | Termination | |
| Group | of 30% | REAC | regime | time | Group |
| No.: | glycerol | (10 μl) | (2 mg/kg) | point (hrs) | size |
| I | Day 1 | ErD | X5 | 72 | 19 |
| II | none | none | none | N/A | 12 (6 × 2) |

Measured Variables: Body weight, Serum Creatinine and P53 protein signal by ELISA.
P53 Protein signal

[0336] The Cisplatin control group (Sample 2) exhibited an increase of 49% in the level of P53 protein signal compared to the Naïve group (Sample 1). Namely, the rats receiving Cisplatin treatment showed increased p53 levels in cochlea with respect naïve rats. The QM5 siRNA treatment caused a reduction of p53 signal to 2.69, which is only 12% higher compared to the Naïve group.

TABLE 3
QM5 siRNA Treatment in eardrop Induced Knockdown of p53 Protein
Expression Levels in the Rat Inner Ear After Cisplatin Administration

| | | P53 |
|---|---|---|
| Sample | Sample Description | protein level |
| 1 | Naive rat cochlea 346 ug/well | 2.40 |
| 2 | Cisplatin only Left ear 346 ug/well | 3.58 |
| 3 | Cisplatin plus QM5 siRNA Right ear 346 ug/well | 2.69 |

### Example 5

### Inner Ear Delivery of Fluorescence Labelled siRNA with L-DNA Structure in Rats

[0337] Description of the test material: sterile 10 mg/ml Cy3-AS-CASP2_{—}4-Struc-L-DNA (alternating 2-O-methylation in the antisense strand and L-DNA nucleotide in position 18 of the sense strand; Sense: GCCAGAAUGUGGAACUCCU Antisense: AGGAGUUCCACAUUCUGGC) or DDIT4_{—}1-Cy3.5 (alternating 2-O-methylation in the sense and antisense strands) in 30% sterile glycerol solution in pyrogen free water. Cy3 is linked to the 3″ end of the antisense strand.

[0338] General: The study included 4 experimental groups as described in Table 4: Experimental groups I-IV (treated by siRNA (DDIT4_{—}1-Cy3.5 or Cy3-AS-CASP2_{—}4-Struc-L-DNA) glycerol based eardrop). Rats were treated by Ear props (ErD) with a single siRNA dose as follows:

[0339] Groups I-IV: dose regime: 100 μg/10 μl/ear of 30% glycerol administration route: REAC (right external auditory canal))/unilateral (Groups I and III) and REAC/LEAC (right/left external auditory canals)/bilateral (Groups II and IV).

TABLE 4
Study Design

| | | Dose | Delivery | | Termination | Group |
|---|---|---|---|---|---|---|
| Group | SiRNA Type | μg/rat | Vol. (μl) | Route | (Days) | Size |
| I | DDIT4_1-Cy3.5 | 100 μg | 10.00 | REAC/Unilateral | 3 | 1 |
| II | DDIT4_1-Cy3.5 | 100 μg | 10.00 | REAC/LEAC/Bilateral | 3 | 1 |
| III | Cy3-AS-CASP2_4- | 100 μg | 10.00 | REAC/Unilateral | 3 | 1 |
| | Struc-L-DNA | | | | | |
| IV | Cy3-AS-CASP2_4- | 100 μg | 10.00 | REAC/LEAC/Bilateral | 3 | 1 |
| | Struc-L-DNA | | | | | |

[0340] Right external auditory canal (REAC/unilateral) delivery: A 10 μl sample volume (warm glycerol based eardrops, 37° C.) was slowly instilled into REAC, using blunt pipette tip. This volume was delivered into each right ear (groups I and III according study design). During and after REAC instillations, rats were kept on contra lateral recumbency (left side) for 40 minutes and then returned to its cage after recovery.

[0341] Right and Left bilateral external auditory canal (REAC/LEAC/bilateral) delivery: A 10 μl sample volume (warm glycerol based eardrops, 37° C.) was slowly instilled into external REAC, using blunt pipette tip. This volume was delivered into each right ear (groups II and IV according study design). During and after REAC instillations, rats were kept on contra lateral recumbency (left side) for 30 minutes, after that turned to the right side and a 10 μl sample volume (warm glycerol based eardrops, 37° C.) was slowly instilled into LEAC, using blunt pipette tip and were kept for additional 30 minutes and returned to its cage after recovery.

[0342] Tissue Collection: Rats were decapitated. Left and right temporal bones including cochlea were collected and post fixed in 4% PFA, whole mount Corti staining was performed.

[0343] EVALUATION: Delivery of siRNA was evaluated using light microscopy and digital imaging. Tissue fragments (cochlea) were considered positive (i.e., a successful siRNA delivery) only if histological (microscopic) examination showed clear fluorescence signal within specific cochlea's structures. Background. DAPI staining was used to assist in identifying cochlea tissue structure.

[0344] Results: Positive siRNA delivery into the inner ear cochlear structures following application of the siRNA by ear drops was observed with both siRNA molecules (Cy3.5 labelled DDIT4 with alternating structure, and Cy3 labelled Casp2_{—}4 with L-DNA structure). The siRNA which was delivered by unilateral application (right ear) was detected in all turns of organ of Corti and spiral ganglions at the concentration of 100 ug in 10 ul 30% warm glycerol.

### Example 6

### The Effect of Glycerol Concentration on siRNA Delivery to Rat Inner Ear Tissues Using Ear Drop Formulation as Determined by siRNA Quantitation

[0345] 6-A: Rats were subjected to unilateral application of eardrops containing 200 μg siRNA/10 μl of PBS, 5%, 10%, 20% or 30% Glycerol. The concentration of siRNA was 10 mg/ml and the siRNA molecule tested was specific to CASP2_mRNA (CASP_{—}4 siRNA molecule having alternating 2′OMe sugar modified ribonucleotides in the antisense strand and L-DNA nucleotide in position 18 of the sense strand; Sense sequence: GCCAGAAUGUGGAACUCCU Antisense sequence: AGGAGUUCCACAUUCUGGC). The cochlear tissue was dissected four hours following eardrops application and the amount of siRNA in the tissue was determined quantitatively using qPCR. Table 5 below summarizes the quantitative results obtained in this experiment.

[0346] These results revealed that the delivery of siRNA into the cochlea by eardrops was effective when the eardrop formulation comprises between 5-20% glycerol as a carrier. The delivery of siRNA into the cochlea by eardrops was most effective when the eardrop formulation comprises 10% glycerol as a carrier.

TABLE 5

| | | SiRNA quantity | |
|---|---|---|---|
| Treatment | No of animals | (fmol/1 μg RNA) | Std |
| 200 μg/10 μl PBS | 3 | 29.09 | 21.20 |
| 200 μg/10 μl 5% Glycerol | 2 | 92.17 | 27.72 |
| 200 μg/10 μl 10% Glycerol | 3 | 161.21 | 16.26 |
| 200 μg/10 μl 20% Glycerol | 2 | 93.78 | 6.52 |
| 200 μg/10 μl 30% Glycerol | 3 | 39.21 | 22.83 |

[0347] 6-B: The above experiment is carried out in the same format with the exception of treating the animals with cisplatin. 10 experimental groups of (6 rats/group each) as follows: Groups are treated with a single siRNA administration: at a dose of 100 mg/10 ml, PBS, 5%5, 10%, 20% 25% or 30% Glycerol delivered by eardrops (ErD), route: REAC; siRNA treatment is performed on day 1 (study initiation), 24 hours prior to the 1st Cisplatin administration (at Cisplatin dose regime: 4 mg/kg daily; administration route: I.P.; injection volume: 1 ml for 250 g rat BW). Rats are subjected to 3 consecutive i.p. injections of Cisplatin (stock concentration: 50 mg/ml; LD50 I.P. dose 6.4 mg/kg). Termination step is performed 24 hrs after the last Cisplatin administration on Day 5 after study initiation. Control Group is treated with a single Vehicle ErD application 10 μl in the same manner as test groups. One experimental group is untreated intact control. The scheduled euthanasia is performed according to the study design. SiRNA to target genes TP53BP2 (ASPP2), BNIP3, CASP2, NOX3, HRK, RAC1, DDIT4, DDIT4L, NOX4, HTRA2, CAPNS1 (Calpain), ID3, HES1, HES5, CDKN1B and ID3.

### Example 7

### Chinchilla Models of Hearing Loss

### (i) Chinchilla Model of Carboplatin-Induced or Cisplatin-Induced Cochlea Hair Cell Death

[0348] Chinchillas are pre-treated by direct administration of specific siRNA in 5%, 10%, 12.5%, 15%, 20%, 25% or 30% glycerol or other permeability enhancer to the left ear of each animal. Glycerol or other vehicle/agent (same final concentrations) is administered to the right ear of each animal as placebo. Two days following the administration of the specific siRNA compounds of the invention, the animals are treated with carboplatin (75 mg/kg i.p.) or cisplatin (intraperitoneal infusion of 13 mg/kg over 30 minutes). After sacrifice of the chinchillas (two weeks post carboplatin treatment) the % of dead cells of inner hair cells (IHC) and outer hair cells (OHC) is calculated in the left ear (siRNA treated) and in the right ear (saline treated). It is calculated that the percent of dead cells of inner hair cells (IHC) and outer hair cells (OHC) is lower in the left ear (siRNA treated) than in the right ear (vehicle control).

### (ii) Chinchilla Model of Acoustic-Induced Cochlea Hair Cell Death

[0349] The activity of specific siRNA in an acoustic trauma model is studied in chinchilla. The animals are exposed to an octave band of noise centered at 4 kHz for 2.5 h at 105 dB. The left ear of the noise-exposed chinchillas is pre-treated (48 h before the acoustic trauma) with 30 μg of siRNA in ˜10 μL of glycerol; the right ear is pre-treated with vehicle (10% glycerol). The compound action potential (CAP) is a convenient and reliable electrophysiological method for measuring the neural activity transmitted from the cochlea. The CAP is recorded by placing an electrode near the base of the cochlea in order to detect the local field potential that is generated when a sound stimulus, such as click or tone burst, is abruptly turned on. The functional status of each ear is assessed 2.5 weeks after the acoustic trauma. Specifically, the mean threshold of the compound action potential recorded from the round window is determined 2.5 weeks after the acoustic trauma in order to determine if the thresholds in the siRNA-treated ear are lower (better) than the untreated (vehicle control) ear. In addition, the amount of inner and outer hair cell loss is determined in the siRNA-treated and the control ear.

1. An otic pharmaceutical composition comprising:
(a) a therapeutically effective amount of at least one oligonucleotide compound which inhibits the expression of a human target gene associated with an ear disorder in the inner ear and/or in the middle ear; (b) 0.1% to about 30% (v/v) glycerol; and (c) at least one pharmaceutically acceptable excipient or carrier, or mixtures thereof.

2. The otic pharmaceutical composition according to claim 1 wherein the target gene is selected from one or more of TP53BP2 (ASPP2), BNIP3, CASP2, NOX3, HRK, RAC1, DDIT4, DDIT4L, NOX4, HTRA2, CAPNS1 (Calpain), ID3, HES1, HES5, CDKN1B and ID3.

3. The otic pharmaceutical composition of claim 1, comprising glycerol at a final concentration of about 5% to about 25% by volume of the composition.

4. The otic pharmaceutical composition of claim 3 comprising glycerol at a final concentration of about 7% to about 13% by volume of the composition.

5. The otic pharmaceutical composition of claim 4 comprising glycerol at a final concentration of about 10% by volume of the composition.

6. The otic pharmaceutical composition of claim 1, wherein the oligonucleotide compound is selected from the group consisting of an antisense, an unmodified siRNA, a chemically modified siRNA, a shRNA, an aptamer, a ribozyme, a dsRNA or DNA compound.

7. The otic pharmaceutical composition of claim 6, wherein the oligonucleotide compound is a chemically modified siRNA.

8. The otic pharmaceutical composition of claim 7, wherein the siRNA has structure set forth below:

| | |
|---|---|
| 5′ (N)ₓ-Z 3′ | (antisense strand) |
| 3′ Z′-(N′)_{y}-z″ 5′ | (sense strand) |

wherein each of N and N′ is a ribonucleotide which may be unmodified or modified, or an unconventional moiety;
wherein each of (N)x and (N′)y is an oligonucleotide in which each consecutive N or N′ is joined to the next N or N′ by a covalent bond;
wherein Z and Z′ may be present or absent, but if present is independently 1 to 5 consecutive nucleotides covalently attached at the 3′ terminus of the strand in which it is present;
wherein z″ may be present or absent, but if present is a capping moiety covalently attached at the 5′ terminus of (N′)y;
wherein each of x and y is independently an integer between 18 and 40;
wherein the sequence of (N′)y is substantially complementary to the sequence of (N)x; and wherein (N)x comprises an antisense sequence substantially complementary to from about 18 to about 40 consecutive ribonucleotides in an mRNA of a target gene associated with an ear disorder.

9. The otic pharmaceutical composition of claim 1, comprising between 0.1 mg/ml to 100 mg/ml of at least one oligonucleotide compound.

10. The otic pharmaceutical composition of claim 9, comprising between 1 mg/ml to 50 mg/ml of at least one oligonucleotide compound.

11. The otic pharmaceutical composition of claim 9, comprising between 5 mg/ml to 20 mg/ml of at least one oligonucleotide compound.

12. The otic pharmaceutical composition according to claim 1 wherein such composition is designed for topical non-invasive administration.

13. The otic pharmaceutical composition according to claim 12, wherein such composition is designed for instillation, deposition or spraying into the ear canal.

14. The otic pharmaceutical composition according to claim 13, wherein the composition is formulated as a cream, a foam, a paste, an ointment, an emulsion, a liquid solution, a gel, spray, a suspension, a microemulsion, microspheres, microcapsules, nanospheres, nanoparticles, lipid vesicles, liposomes, polymeric vesicles, a patch, a biological insert.

15. The otic pharmaceutical composition according to claim 14, wherein the composition is formulated as an eardrop.

16. (canceled)

17. (canceled)

18. A method of treating a subject suffering from or at risk of an ear disorder, the method comprises topically administering to the canal of the subject's ear an otic pharmaceutical composition comprising a therapeutically effective amount of at least one oligonucleotide compound; a permeability enhancer and a pharmaceutically acceptable excipient or carrier, or mixtures thereof, thereby reducing expression of a human target gene associated with the disorder in the inner ear and/or in the muddle ear of the subject.

19. A method of reducing hearing loss in a subject which comprises topically administering to the canal of the subject's ear an otic pharmaceutical composition comprising: (a) a therapeutically effective amount of at least one oligonucleotide compound which inhibits the expression of a human target gene associated with the hearing loss; (b) a permeability enhancer and (c) a pharmaceutically acceptable excipient or carrier, or mixtures thereof, thereby reducing the hearing loss in the subject.

20. The method according to claim 19 wherein the hearing loss is selected from ototoxin-induced hearing loss, acoustic induced hearing loss or age related hearing loss.

21. The method according to claim 20, wherein the ototoxin is cisplatin or cisplatin analog.

22. The method according to claim 20 wherein the target gene is selected from one or more of: TP53BP2 (ASPP2), BNIP3, CASP2, NOX3, HRK, RAC1, DDIT4, DDIT4L, NOX4, HTRA2, CAPNS1 (Calpain) and 103.

23. A method of inducing ear hair cell regeneration in a subject's ear which comprises topically administering to the canal of the subject's ear an otic pharmaceutical composition comprising: (a) therapeutically effective amount of at least one oligonucleotide compound which inhibits the expression of a human target gene associated with a hair cell loss in the ear; (b) a permeability enhancer and (c) a pharmaceutically acceptable excipient or carrier, or mixtures thereof, thereby inducing hair cell regeneration in the subject's ear.

24. (canceled)

25. (canceled)

26. (canceled)

27. (canceled)

28. (canceled)

29. (canceled)

30. (canceled)

31. The method of claim 18, wherein oligonucleotide compound is selected from the group consisting of an antisense, an unmodified siRNA, a chemically modified siRNA, a shRNA, an aptamer, a ribozyme, a dsRNA or DNA compound.

32. The method of claim 31, wherein the oligonucleotide compound is a chemically modified siRNA.

33. The method of claim 31, wherein the siRNA has structure set forth below:

| | |
|---|---|
| 5′ (N)ₓ-Z 3′ | (antisense strand) |
| 3′ Z′-(N′)_{y}-z″ 5′ | (sense strand) |

wherein each of N and N′ is a ribonucleotide which may be unmodified or modified, or an unconventional moiety;
wherein each of (N)x and (N′)y is an oligonucleotide in which each consecutive N or N′ is joined to the next N or N′ by a covalent bond;
wherein Z and Z′ may be present or absent, but if present is independently 1 to 5 consecutive nucleotides covalently attached at the 3′ terminus of the strand in which it is present;
wherein z″ may be present or absent, but if present is a capping moiety covalently attached at the 5′ terminus of (N′)y;
wherein each of x and y is independently an integer between 18 and 40;
wherein the sequence of (N′)y is substantially complementary to the sequence of (N)x; and wherein (N)x comprises an antisense sequence substantially complementary to from about 18 to about 40 consecutive ribonucleotides in an mRNA of a target gene associated with an ear disorder.

34. (canceled)

35. (canceled)

36. (canceled)

37. (canceled)

38. (canceled)

39. (canceled)

40. (canceled)

41. (canceled)

42. (canceled)

The application's sequence listing, which the Patent Office published only in electronic form, follows.

SEQUENCE LISTING (5842 sequences)

SEQ ID NO: 1 - DNA, 3405 bp, Homo sapiens
atgcggttcgggtccaagatgatgccgatgtttcttaccgtgtatctcagtaacaatgagcagcacttcacagaagttccagttactccagaaacaatatgcagagacgtggtggatctgtgcaaagaacccggcgagagtgattgccatttggctgaagtgtggtgtggctctgaacgtccagttgcggataatgagcgaatgtttgatgttcttcaacgatttggaagtcagaggaacgaagttcgcttcttccttcgtcatgaacgcccccctggcagggacattgtgagtggaccaagatctcaggatccaagtttaaaaagaaatggtgtaaaagttcctggtgaatatcgaagaaaggagaacggtgttaatagtcctaggatggatctgactcttgctgaacttcaggaaatggcatctcgccagcagcaacagattgaagcccagcaacaattgctggcaactaaggaacagcgcttaaagtttttgaaacaacaagatcagcgacaacagcaacaagttgctgagcaggagaaacttaaaaggctaaaagaaatagctgagaatcaggaagctaagctaaaaaaagtgagagcacttaaaggccacgtggaacagaagagactaagcaatgggaaacttgtggaggaaattgaacagatgaataatttgttccagcaaaaacagagggagctcgtcctggctgtgtcaaaagtagaagaactgaccaggcagctagagatgctcaagaacggcaggatcgacagccaccatgacaatcagtctgcagtggctgagcttgatcgcctctataaggagctgcagctaagaaacaaattgaatcaagagcagaatgccaagctacaacaacagagggagtgtttgaataagcgtaattcagaagtggcagtcatggataagcgtgttaatgagctgagggaccggctgtggaagaagaaggcagctctacagcaaaaagaaaatctaccagtttcatctgatggaaatcttccccagcaagccgcgtcagccccaagccgtgtggctgcagtaggtccctatatccagtcgtctactatgcctcggatgccctcaaggcctgaattgctggtgaagccagccctgccggatggttccttggtcattcaggcttcagaggggccgatgaaaatacagacactgcccaacatgagatctggggctgcttcacaaactaaaggctctaaaatccatccagttggccctgattggagtccttcaaatgcagatcttttcccaagccaaggctctgcttctgtacctcaaagcactgggaatgctctggatcaagttgatgatggagaggttccgctgagggagaaagagaagaaagtgcgtccgttctcaatgtttgatgcagtagaccagtccaatgccccaccttcctttggtactctgaggaagaaccagagcagtgaagatatcttgcgggatgctcaggttgcaaataaaaatgtggctaaagtaccacctcctgttcctacaaaaccaaaacagattaatttgccttattttggacaaactaatcagccaccttcagacattaagccagacggaagttctcagcagttgtcaacagttgttccgtccatgggaactaaaccaaaaccagcagggcagcagccgagagtgctgctatctcccagcataccttcggttggccaagaccagaccctttctccaggttctaagcaagaaagtccacctgctgctgccgtccggccctttactccccagccttccaaagacaccttacttccacccttcagaaaaccccagaccgtggcagcaagttcaatatattccatgtatacgcaacagcaggcgccaggaaaaaacttccagcaggctgtgcagagcgcgttgaccaagactcataccagagggccacacttttcaagtgtatatggtaagcctgtaattgctgctgcccagaatcaacagcagcacccagagaacatttattccaatagccagggcaagcctggcagtccagaacctgaaacagagcctgtttcttcagttcaggagaaccatgaaaacgaaagaattcctcggccactcagcccaactaaattactgcctttcttatctaatccttaccgaaaccagagtgatgctgacctagaagccttacgaaagaaactgtctaacgcaccaaggcctctaaagaaacgtagttctattacagagccagagggtcctaatgggccaaatattcagaagcttttatatcagaggaccaccatagcggccatggagaccatctctgtcccatcatacccatccaagtcagcttctgtgactgccagctcagaaagcccagtagaaatccagaatccatatttacatgtggagcccgaaaaggaggtggtctctctggttcctgaatcattgtccccagaggatgtggggaatgccagtacagagaacagtgacatgccagctccttctccaggccttgattatgagcctgagggagtcccagacaacagcccaaatctccagaataacccagaagaaccaaatccagaggctccacatgtgcttgatgtgtacctggaggagtaccctccatacccacccccaccatacccatctggggagcctgaagggcccggagaagactcggtgagcatgcgcccgcctgaaatcaccgggcaggtctctctgcctcctggtaaaaggacaaacttgcgtaaaactggctcagagcgtatcgctcatggaatgagggtgaaattcaacccccttgctttactgctagattcgtctttggagggagaatttgaccttgtacagagaattatttatgaggttgatgacccaagcctccccaatgatgaaggcatcacggctcttcacaatgctgtgtgtgcaggccacacagaaatcgttaagttcctggtacagtttggtgtaaatgtaaatgctgctgatagtgatggatggactccattacattgtgctgcctcatgtaacaacgtccaagtgtgtaagtttttggtggagtcaggagccgctgtgtttgccatgacctacagtgacatgcagactgctgcagataagtgcgaggaaatggaggaaggctacactcagtgctcccaatttctttatggagttcaggagaagatgggcataatgaataaaggagtcatttatgcgctttgggattatgaacctcagaatgatgatgagctgcccatgaaagaaggagactgcatgacaatcatccacagggaagacgaagatgaaatcgaatggtggtgggcgcgccttaatgataaggagggatatgttccacgtaacttgctgggactgtacccaagaattaaaccaagacaaaggagcttggcctga

SEQ ID NO: 2 - DNA, 4802 bp, Homo sapiens
gctggggcccgacccgggattagttggtttcggagcggaggagggagccccgaccgtcacgagcgtcgaagagacaaagccgcgtcagggggcccggccggggcgggggagcccggggcttgttggtgccccagcccgcgcggagggcccttcggacccgcgcgccgccgctgccgccgccgccgcctcgcaacaggtccgggcggcctcgctctccgctcccctcccccgcatccgcgaccctccggggcacctcagctcggccggggccgcagtctggccacccgcttccatgcggttcgggtccaagatgatgccgatgtttcttaccgtgtatctcagtaacaatgagcagcacttcacagaagttccagttactccagaaacaatatgcagagacgtggtggatctgtgcaaagaacccggcgagagtgattgccatttggctgaagtgtggtgtggctctgtagagatagagtttcatcatgttggccaggatggtctcgatctcctgaccttgtgatccgcctgcctcggcctcccaaagtgctggattacaggtgtgagccaccacgatcagcctctagtgtttaaaaaagaacgtccagttgcggataatgagcgaatgtttgatgttcttcaacgatttggaagtcagaggaacgaagttcgcttcttccttcgtcatgaacgcccccctggcagggacattgtgagtggaccaagatctcaggatccaagtttaaaaagaaatggtgtaaaagttcctggtgaatatcgaagaaaggagaacggtgttaatagtcctaggatggatctgactcttgctgaacttcaggaaatggcatctcgccagcagcaacagattgaagcccagcaacaattgctggcaactaaggaacagcgcttaaagtttttgaaacaacaagatcagcgacaacagcaacaagttgctgagcaggagaaacttaaaaggctaaaagaaatagctgagaatcaggaagctaagctaaaaaaagtgagagcacttaaaggccacgtggaacagaagagactaagcaatgggaaacttgtggaggaaattgaacagatgaataatttgttccagcaaaaacagagggagctcgtcctggctgtgtcaaaagtagaagaactgaccaggcagctagagatgctcaagaacggcaggatcgacagccaccatgacaatcagtctgcagtggctgagcttgatcgcctctataaggagctgcagctaagaaacaaattgaatcaagagcagaatgccaagctacaacaacagagggagtgtttgaataagcgtaattcagaagtggcagtcatggataagcgtgttaatgagctgagggaccggctgtggaagaagaaggcagctctacagcaaaaagaaaatctaccagtttcatctgatggaaatcttccccagcaagccgcgtcagccccaagccgtgtggctgcagtaggtccctatatccagtcgtctactatgcctcggatgccctcaaggcctgaattgctggtgaagccagccctgccggatggttccttggtcattcaggcttcagaggggccgatgaaaatacagacactgcccaacatgagatctggggctgcttcacaaactaaaggctctaaaatccatccagttggccctgattggagtccttcaaatgcagatcttttcccaagccaaggctctgcttctgtacctcaaagcactgggaatgctctggatcaagttgatgatggagaggttccgctgagggagaaagagaagaaagtgcgtccgttctcaatgtttgatgcagtagaccagtccaatgccccaccttcctttggtactctgaggaagaaccagagcagtgaagatatcttgcgggatgctcaggttgcaaataaaaatgtggctaaagtaccacctcctgttcctacaaaaccaaaacagattaatttgccttattttggacaaactaatcagccaccttcagacattaagccagacggaagttctcagcagttgtcaacagttgttccgtccatgggaactaaaccaaaaccagcagggcagcagccgagagtgctgctatctcccagcataccttcggttggccaagaccagaccctttctccaggttctaagcaagaaagtccacctgctgctgccgtccggccctttactccccagccttccaaagacaccttacttccacccttcagaaaaccccagaccgtggcagcaagttcaatatattccatgtatacgcaacagcaggcgccaggaaaaaacttccagcaggctgtgcagagcgcgttgaccaagactcataccagagggccacacttttcaagtgtatatggtaagcctgtaattgctgctgcccagaatcaacagcagcacccagagaacatttattccaatagccagggcaagcctggcagtccagaacctgaaacagagcctgtttcttcagttcaggagaaccatgaaaacgaaagaattcctcggccactcagcccaactaaattactgcctttcttatctaatccttaccgaaaccagagtgatgctgacctagaagccttacgaaagaaactgtctaacgcaccaaggcctctaaagaaacgtagttctattacagagccagagggtcctaatgggccaaatattcagaagcttttatatcagaggaccaccatagcggccatggagaccatctctgtcccatcatacccatccaagtcagcttctgtgactgccagctcagaaagcccagtagaaatccagaatccatatttacatgtggagcccgaaaaggaggtggtctctctggttcctgaatcattgtccccagaggatgtggggaatgccagtacagagaacagtgacatgccagctccttctccaggccttgattatgagcctgagggagtcccagacaacagcccaaatctccagaataacccagaagaaccaaatccagaggctccacatgtgcttgatgtgtacctggaggagtaccctccatacccacccccaccatacccatctggggagcctgaagggcccggagaagactcggtgagcatgcgcccgcctgaaatcaccgggcaggtctctctgcctcctggtaaaaggacaaacttgcgtaaaactggctcagagcgtatcgctcatggaatgagggtgaaattcaacccccttgctttactgctagattcgtctttggagggagaatttgaccttgtacagagaattatttatgaggttgatgacccaagcctccccaatgatgaaggcatcacggctcttcacaatgctgtgtgtgcaggccacacagaaatcgttaagttcctggtacagtttggtgtaaatgtaaatgctgctgatagtgatggatggactccattacattgtgctgcctcatgtaacaacgtccaagtgtgtaagtttttggtggagtcaggagccgctgtgtttgccatgacctacagtgacatgcagactgctgcagataagtgcgaggaaatggaggaaggctacactcagtgctcccaatttctttatggagttcaggagaagatgggcataatgaataaaggagtcatttatgcgctttgggattatgaacctcagaatgatgatgagctgcccatgaaagaaggagactgcatgacaatcatccacagggaagacgaagatgaaatcgaatggtggtgggcgcgccttaatgataaggagggatatgttccacgtaacttgctgggactgtacccaagaattaaaccaagacaaaggagcttggcctgaaacttccacacagaattttagtcaatgaagaattaatctctgttaagaagaagtaatacgattatttttggcaaaaatttcacaagacttattttaatgacaatgtagcttgaaagcgatgaagaatgtctctagaagagaatgaaggattgaagaattcaccattagaggacatttagcgtgatgaaataaagcatctacgtcagcaggccatactgtgttggggcaaaggtgtcccgtgtagcactcagataagtatacagcgacaatcctgttttctacaagaatcctgtctagtaaataggatcatttattgggcagttgggaaatcagctctctgtcctgttgagtgttttcagcagctgctcctaaaccagtcctcctgccagaaaggaccagtgccgtcacatcgctgtctctgattgtccccggcaccagcaggcccttggggggctcacctgaaggctcgaaggcactgcacacttgtatattgtcagtgaagaactgttagttggttgtcagtgaacaataactttattatatgagtttttgtagcatcttaagaattatacatatgtttgaaatattgaaactaagctacggtaccagtaattagatgtagaatcttgtttgtaggctgaattttaatctgtatttattgtcttttgtatctcagaaattagaaacttgctacagacttacccgtaatatttgtcaagatcatagctgactttaaaaacagttgtaataaactttttgatgctagctgtttactggtttttgtttttgatgtcataaatagaccttgtttaatagtcacaagccgttgggatatcatacccagctgaaaaagaacaaactgcttaacataagtatatgtatcgtaataagagttttttaccagctaagtgattcaatgtaagtggtttttaaaataaaatactgtagagatcatggtgaaaaaaaaaaaaaa

SEQ ID NO: 3 - DNA, 3046 bp, Homo sapiens
gccggcgggatcccaggcgccgagcgcccgctgagcagccaccctttgcgcgccgcctgcagcgcagcttccccgggcgctgcctggacaggcctgcctgcgtgctgggacatgtctggcctccaaggaccgtcggtgggcgatggctgcaacggtggaggggccagagctggaggcagctgctgccgcaggagatgcttcagaggattcggacgcagggtccagggcgctgcctttcctgggcggcaaccggctgagcttggacctgtaccccgggggctgccagcagctgctgcacctgtgtgtccagcagcctctgcagctgctgcaggtggaattcttgcgtctgagcactcacgaggaccctcagctgctggaggccaccctggcccagctgcctcagagcctgtcctgcctccgctccctggtcctcaaagggtcgatctgggacctcggaccctggctctgagggccacatccgcctccccccttcccaggagggcaacgccgggacacactgggtgcctgtctccggggtgccctgaccaacctgcccgctggtctgagtggcctggcccatctggcccacctggacctgagcttcaacagcctggagacactgccggcctgtgtcctgcagatgcgaggtctgggtgcgctcttgctgtctcacaactgcctctctgagctgcctgaggctctgggggccctccccgccctcaccttcctcacagtgacacacaaccgcctgcagacgctgcccccagcactgggggccctatccaccctgcagcgcctcgatctctctcagaatctgctggacacgctacctcctgagattggaggcctgggcagcctcctggagctcaacctggcctccaaccggctgcagagcctcccagcctctctggcgggacttcggtccttgcggctccttgtcctgcacagcaacctcctggcctctgtgccagctgacttggcccgccttccactcctcacccggctcgacctgagggacaaccagctccgggacctgccccctgagctgctagacgccccctttgtgcgcctgcaggggaaccccctgggtgaggcctcgccagacgccccgagttcaccagtggcagccctcattccagaaatgcccagactgttcctgacctcagatttggacagctttcctgtgacccctcaaggctgctcagtgaccctggcctgtggcgtccgcctgcagttcccagcgggagccaccgccacccccatcaccatccgctatcggctgctgctgccggagccaggcctcgtccccctgggtcctcatgacgccctgctcagccatgtgctggagctgcagccccatggggtggccttccagcaggatgtggggctgtggctgctcttcaccccaccgcaggcccggcgctgccgtgaagtggtggtcaggacccggaatgacaacagctggggtgacctggagacctacctggaggaagaggcaccccagcggctctgggctcactgccaggtgccccacttctcctggttccttgtggtttcccgccctgtgtccaatgcctgcctggtgccaccggaggggacactgctgtgctcctcgggtcatcctggggtcaaagtcatcttcccccctggggccactgaggagcctcgtcgagtctccatgcaggtggtgcgcatggctggccgagagctgcaggccctcctgggagaaccagaggctgcagtgagccccctgctgtgcctgtcacagagcggtccccccagcttcctccaaccggtcaccgtgcagctgcctctgccctctggcatcacaggcctcagtctggaccgctcccgcctgcacctgttgtactgggcccctcctgcagccacctgggatgacatcacagctcaggtggtcctggagctcacccacctgtactggctctggtacaccaccaagaactgtgtgggaggcctggctcggaaggcctgggagcggctgcggctgcaccgtgtgaacctcatcgctctgcagcggcgccgggaccctgagcaggtcctgctgcagtgcctgccccgaaacaaggtggacgccacccttcggcggctgctggagcggtaccggggccccgagccctctgacacggtggagatgttcgagggcgaagagttctttgcggccttcgagcgcggcatcgacgtggatgctgaccgccctgactgtgtggagggcagaatctgctttgtcttctactcgcacctgaagaatgtgaaggaggtatacgtgaccaccactctggaccgggaggctcaggctgtgcggggccaggtgtccttctaccgtggcgcggtgcctgtgcgggtgcccgaggaggctgaggctgcccggcagaggaagggcgcagacgccctgtggatggccactctgcccatcaagctgccgagacttcgagggtccgaggggccacggcggggggctggcctctccttggcacccttgaatctgggagatgccgagaccggctttctgacgcagagcaacctgctgagtgtggctgggcgtctgggtctggactggccagccgtggccctgcacctgggggtgtcctaccgggaggtgcagcgcatccggcacgagttccgggatgatctggatgagcagatccgtcacatgctcttctcctgggctgagcgccaggctgggcagccaggggctgtggggctcctggtgcaggccctggagcagagtgaccggcaggacgtggctgaagaggtgcgcgcagtcttggagctcggccgccgcaagtaccaggacagcatccgacgcatgggcttggcccccaaggaccccgctctgcctggctcctcggctccacagcccccagagcctgcccaggcctaggccccacagacttttaggctggcccagatattccccagtggatgggcagagcccccaccttcaagtctctccagtgtgtggggacgggtccctgtgagcaacaaaactgcactgtttctttcacctcaaaaaaaaaaaaaaaaa

SEQ ID NO: 4 - DNA, 3025 bp, Homo sapiens
gccggcgggatcccaggcgccgagcgcccgctgagcagccaccctttgcgcgccgcctgcagcgcagcttccccgggcgctgcctggacaggcctgcctgcgtgctgggacatgtctggcctccaaggaccgtcggtgggcgatggctgcaacggtggaggggccagagctggaggcagctgctgccgcaggagatgcttcagaggattcggacgcagggtccagggcgctgcctttcctgggcggcaaccggctgagcttggacctgtaccccgggggctgccagcagctgctgcacctgtgtgtccagcagcctctgcagctgctgcaggtggaattcttgcgtctgagcactcacgaggaccctcagctgctggaggccaccctggcccagctgcctcagagcctgtcctgcctccgctccctggtcctcaaaggagggcaacgccgggacacactgggtgcctgtctccggggtgccctgaccaacctgcccgctggtctgagtggcctggcccatctggcccacctggacctgagcttcaacagcctggagacactgccggcctgtgtcctgcagatgcgaggtctgggtgcgctcttgctgtctcacaactgcctctctgagctgcctgaggctctgggggccctccccgccctcaccttcctcacagtgacacacaaccgcctgcagacgctgcccccagcactgggggccctatccaccctgcagcgcctcgatctctctcagaatctgctggacacgctacctcctgagattggaggcctgggcagcctcctggagctcaacctggcctccaaccggctgcagagcctcccagcctctctggcgggacttcggtccttgcggctccttgtcctgcacagcaacctcctggcctctgtgccagctgacttggcccgccttccactcctcacccggctcgacctgagggacaaccagctccgggacctgccccctgagctgctagacgccccctttgtgcgcctgcaggggaaccccctgggtgaggcctcgccagacgccccgagttcaccagtggcagccctcattccagaaatgcccagactgttcctgacctcagatttggacagctttcctgtgacccctcaaggctgctcagtgaccctggcctgtggcgtccgcctgcagttcccagcgggagccaccgccacccccatcaccatccgctatcggctgctgctgccggagccaggcctcgtccccctgggtcctcatgacgccctgctcagccatgtgctggagctgcagccccatggggtggccttccagcaggatgtggggctgtggctgctcttcaccccaccgcaggcccggcgctgccgtgaagtggtggtcaggacccggaatgacaacagctggggtgacctggagacctacctggaggaagaggcaccccagcggctctgggctcactgccaggtgccccacttctcctggttccttgtggtttcccgccctgtgtccaatgcctgcctggtgccaccggaggggacactgctgtgctcctcgggtcatcctggggtcaaagtcatcttcccccctggggccactgaggagcctcgtcgagtctccatgcaggtggtgcgcatggctggccgagagctgcaggccctcctgggagaaccagaggctgcagtgagccccctgctgtgcctgtcacagagcggtccccccagcttcctccaaccggtcaccgtgcagctgcctctgccctctggcatcacaggcctcagtctggaccgctcccgcctgcacctgttgtactgggcccctcctgcagccacctgggatgacatcacagctcaggtggtcctggagctcacccacctgtacgcacgcttccaggtcacacacttctcctggtactggctctggtacaccaccaagaactgtgtgggaggcctggctcggaaggcctgggagcggctgcggctgcaccgtgtgaacctcatcgctctgcagcggcgccgggaccctgagcaggtcctgctgcagtgcctgccccgaaacaaggtggacgccacccttcggcggctgctggagcggtaccggggccccgagccctctgacacggtggagatgttcgagggcgaagagttctttgcggccttcgagcgcggcatcgacgtggatgctgaccgccctgactgtgtggagggcagaatctgctttgtcttctactcgcacctgaagaatgtgaaggaggtatacgtgaccaccactctggaccgggaggctcaggctgtgcggggccaggtgtccttctaccgtggcgcggtgcctgtgcgggtgcccgaggaggctgaggctgcccggcagaggaagggcgcagacgccctgtggatggccactctgcccatcaagctgccgagacttcgagggtccgaggggccacggcggggggctggcctctccttggcacccttgaatctgggagatgccgagaccggctttctgacgcagagcaacctgctgagtgtggctgggcgtctgggtctggactggccagccgtggccctgcacctgggggtgtcctaccgggaggtgcagcgcatccggcacgagttccgggatgatctggatgagcagatccgtcacatgctcttctcctgggctgagcgccaggctgggcagccaggggctgtggggctcctggtgcaggccctggagcagagtgaccggcaggacgtggctgaagaggtgcgcgcagtcttggagctcggccgccgcaagtaccaggacagcatccgacgcatgggcttggcccccaaggaccccgctctgcctggctcctcggctccacagcccccagagcctgcccaggcctaggccccacagacttttaggctggcccagatattccccagtggatgggcagagcccccaccttcaagtctctccagtgtgtggggacgggtccctgtgagcaacaaaactgcactgtttctttcacctcaaaaaaaaaaaaaaaaaaaaaaa

SEQ ID NO: 5 - DNA, 2902 bp, Homo sapiens
gcttccccgggcgctgcctggacaggcctgcctgcgtgctgggacatgtctggcctccaaggaccgtcggtgggcgatggctgcaacggtggaggggccagagctggaggcagctgctgccgcaggagatgcttcagaggattcggacgcagggtccagggcgctgcctttcctgggcggcaaccggctgagcttggacctgtaccccgggggctgccagcagctgctgcacctgtgtgtccagcagcctctgcagctgctgcaggtggaattcttgcgtctgagcactcacgaggaccctcagctgctggaggccaccctggcccagctgcctcagagcctgtcctgcctccgctccctggtcctcaaaggagggcaacgccgggacacactgggtgcctgtctccggggtgccctgaccaacctgcccgctggtctgagtggcctggcccatctggcccacctggacctgagcttcaacagcctggagacactgccggcctgtgtcctgcagatgcgaggtctgggtgcgctcttgctgtctcacaactgcctctctgagctgcctgaggctctgggggccctccccgccctcaccttcctcacagtgacacacaaccgcctgcagacgctgcccccagcactgggggccctatccaccctgcagcgcctcgatctctctcagaatctgctggacacgctacctcctgagattggaggcctgggcagcctcctggagctcaacctggcctccaaccggctgcagagcctcccagcctctctggcgggacttcggtccttgcggctccttgtcctgcacagcaacctcctggcctctgtgccagctgacttggcccgccttccactcctcacccggctcgacctgagggacaaccagctccgggacctgccccctgagctgctagacgccccctttgtgcgcctgcaggggaaccccctgggtgaggcctcgccagacgccccgagttcaccagtggcagccctcattccagaaatgcccagactgttcctgacctcagatttggacagctttcctgtgacccctcaaggctgctcagtgaccctggcctgtggcgtccgcctgcagttcccagcgggagccaccgccacccccatcaccatccgctatcggctgctgctgccggagccaggcctcgtccccctgggtcctcatgacgccctgctcagccatgtgctggagctgcagccccatggggtggccttccagcaggatgtggggctgtggctgctcttcaccccaccgcaggcccggcgctgccgtgaagtggtggtcaggacccggaatgacaacagctggggtgacctggagacctacctggaggaagaggcaccccagcggctctgggctcactgccaggtgccccacttctcctggttccttgtggtttcccgccctgtgtccaatgcctgcctggtgccaccggaggggacactgctgtgctcctcgggtcatcctggggtcaaagtcatcttcccccctggggccactgaggagcctcgtcgagtctccatgcaggtggtgcgcatggctggccgagagctgcaggccctcctgggagaaccagaggctgcagtgagccccctgctgtgcctgtcacagagcggtccccccagcttcctccaaccggtcaccgtgcagctgcctctgccctctggcatcacaggcctcagtctggaccgctcccgcctgcacctgttgtactgggcccctcctgcagccacctgggatgacatcacagctcaggtggtcctggagctcacccacctgtacgcacgcttccaggtcacacacttctcctggtactggctctggtacaccaccaagaactgtgtgggaggcctggctcggaaggcctgggagcggctgcggctgcaccgtgtgaacctcatcgctctgcagcggcgccgggaccctgagcaggtcctgctgcagtgcctgccccgaaacaaggtggacgccacccttcggcggctgctggagcggtaccggggccccgagccctctgacacggtggagatgttcgagggcgaagagttctttgcggccttcgagcgcggcatcgacgtggatgctgaccgccctgactgtgtggagggcagaatctgctttgtcttctactcgcacctgaagaatgtgaaggaggtgtccttctaccgtggcgcggtgcctgtgcgggtgcccgaggaggctgaggctgcccggcagaggaagggcgcagacgccctgtggatggccactctgcccatcaagctgccgagacttcgagggtccgaggggccacggcggggggctggcctctccttggcacccttgaatctgggagatgccgagaccggctttctgacgcagagcaacctgctgagtgtggctgggcgtctgggtctggactggccagccgtggccctgcacctgggggtgtcctaccgggaggtgcagcgcatccggcacgagttccgggatgatctggatgagcagatccgtcacatgctcttctcctgggctgagcgccaggctgggcagccaggggctgtggggctcctggtgcaggccctggagcagagtgaccggcaggacgtggctgaagaggtgcgcgcagtcttggagctcggccgccgcaagtaccaggacagcatccgacgcatgggcttggcccccaaggaccccgctctgcctggctcctcggctccacagcccccagagcctgcccaggcctaggccccacagacttttaggctggcccagatattccccagtggatgggcagagcccccaccttcaagtctctccagtgtgtggggacgggtccctgtgagcaacaaaactgcactgtttctttcacctcaaaaaaaaaaaaaaaaa

SEQ ID NO: 6 - DNA, 743 bp, Homo sapiens
cgcgcctagcagtgtcccagccgggttcgtgtcgccatggggcagatcgagtgggccatgtgggccaacgaacaggcgctggcgtccggcctgatcctcatcaccgggggcatcgtggccacagctgggcgcttcacccagtggtactttggtgcctactccattgtggcgggcgtgtttgtgtgcctgctggagtacccccgggggaagaggaagaagggctccaccatggagcgctggggacagaagtacatgaccgccgtggtgaagctgttcgggccctttaccaggaattactatgttcgggccgtcctgcatctcctgctctcggtgcccgccggcttcctgctggccaccatccttgggaccgcctgcctggccattgcgagcggcatctacctactggcggctgtgcgtggcgagcagtggacgcccatcgagcccaagccccgggagcggccgcagatcggaggcaccatcaagcagccgcccagcaaccccccgccgcggcccccggccgaggcccgcaagaagcccagcgaggaggaggctgcggtggcggcggggggacccccgggaggtccccaggtcaaccccatcccggtgaccgacgaggtcgtgtgacctcgccccggacctgccctcccgccaggtgcacccacctgcaataaatgcagcgaagccgggaaaaaaaaaaaaaaaaaaaaaaaaaaaaaaaaaaaaaaaaaaaaaaaaaaaaaaaa

SEQ ID NO: 7 - DNA, 2629 bp, Homo sapiens
acttgtcatggcgactgtccagctttgtgccaggagcctcgcaggggttgatgggattggggttttcccctcccatgtgctcaagactggcgctaaaagttttgagcttctcaaaagtctagagccaccgtccagggagcaggtagctgctgggctccggggacactttgcgttcgggctgggagcgtgctttccacgacggtgacacgcttccctggattggcagccagactgccttccgggtcactgccatggaggagccgcagtcagatcctagcgtcgagccccctctgagtcaggaaacattttcagacctatggaaactacttcctgaaaacaacgttctgtcccccttgccgtcccaagcaatggatgatttgatgctgtccccggacgatattgaacaatggttcactgaagacccaggtccagatgaagctcccagaatgccagaggctgctccccgcgtggcccctgcaccagcagctcctacaccggcggcccctgcaccagccccctcctggcccctgtcatcttctgtcccttcccagaaaacctaccagggcagctacggtttccgtctgggcttcttgcattctgggacagccaagtctgtgacttgcacgtactcccctgccctcaacaagatgttttgccaactggccaagacctgccctgtgcagctgtgggttgattccacacccccgcccggcacccgcgtccgcgccatggccatctacaagcagtcacagcacatgacggaggttgtgaggcgctgcccccaccatgagcgctgctcagatagcgatggtctggcccctcctcagcatcttatccgagtggaaggaaatttgcgtgtggagtatttggatgacagaaacacttttcgacatagtgtggtggtgccctatgagccgcctgaggttggctctgactgtaccaccatccactacaactacatgtgtaacagttcctgcatgggcggcatgaaccggaggcccatcctcaccatcatcacactggaagactccagtggtaatctactgggacggaacagctttgaggtgcgtgtttgtgcctgtcctgggagagaccggcgcacagaggaagagaatctccgcaagaaaggggagcctcaccacgagctgcccccagggagcactaagcgagcactgcccaacaacaccagctcctctccccagccaaagaagaaaccactggatggagaatatttcacccttcagatccgtgggcgtgagcgcttcgagatgttccgagagctgaatgaggccttggaactcaaggatgcccaggctgggaaggagccaggggggagcagggctcactccagccacctgaagtccaaaaagggtcagtctacctcccgccataaaaaactcatgttcaagacagaagggcctgactcagactgacattctccacttcttgttccccactgacagcctcccacccccatctctccctcccctgccattttgggttttgggtctttgaacccttgcttgcaataggtgtgcgtcagaagcacccaggacttccatttgctttgtcccggggctccactgaacaagttggcctgcactggtgttttgttgtggggaggaggatggggagtaggacataccagcttagattttaaggtttttactgtgagggatgtttgggagatgtaagaaatgttcttgcagttaagggttagtttacaatcagccacattctaggtaggtaggggcccacttcaccgtactaaccagggaagctgtccctcatgttgaattttctctaacttcaaggcccatatctgtgaaatgctggcatttgcacctacctcacagagtgcattgtgagggttaatgaaataatgtacatctggccttgaaaccaccttttattacatggggtctaaaacttgacccccttgagggtgcctgttccctctccctctccctgttggctggtgggttggtagtttctacagttgggcagctggttaggtagagggagttgtcaagtcttgctggcccagccaaaccctgtctgacaacctcttggtcgaccttagtacctaaaaggaaatctcaccccatcccacaccctggaggatttcatctcttgtatatgatgatctggatccaccaagacttgttttatgctcagggtcaatttcttttttcttttttttttttttttttctttttctttgagactgggtctcgctttgttgcccaggctggagtggagtggcgtgatcttggcttactgcagcctttgcctccccggctcgagcagtcctgcctcagcctccggagtagctgggaccacaggttcatgccaccatggccagccaacttttgcatgttttgtagagatggggtctcacagtgttgcccaggctggtctcaaactcctgggctcaggcgatccacctgtctcagcctcccagagtgctgggattacaattgtgagccaccacgtggagctggaagggtcaacatcttttacattctgcaagcacatctgcattttcaccccacccttcccctccttctccctttttatatcccatttttatatcgatctcttattttacaataaaactttgctgcca

SEQ ID NO: 8 - DNA, 4145 bp, Homo sapiens
gggtggcctggtgtgtgggcgcggcagggcgcaggcgcaggcgcagtgtgcgtccgcgtctgaggggagggatgtgggggaagcgacggcccccggtttgtttgggctgtgggcggtgcgcagcggagagcccgggaaaagcgggaaatggcggcgccgagcgcggggtcttggtccaccttccagcacaaggagctgatggccgctgacaggggacgcaggatattgggagtgtgtggcatgcatcctcatcatcaggaaactctaaaaaagaaccgagtggtgctagccaaacagctgttgttgagcgaattgttagaacatcttctggagaaggacatcatcaccttggaaatgagggagctcatccaggccaaagtgggcagtttcagccagaatgtggaactcctcaacttgctgcctaagaggggtccccaagcttttgatgccttctgtgaagcactgagggagaccaagcaaggccacctggaggatatgttgctcaccaccctttctgggcttcagcatgtactcccaccgttgagctgtgactacgacttgagtctcccttttccggtgtgtgagtcctgtcccctttacaagaagctccgcctgtcgacagatactgtggaacactccctagacaataaagatggtcctgtctgccttcaggtgaagccttgcactcctgaattttatcaaacacacttccagctggcatataggttgcagtctcggcctcgtggcctagcactggtgttgagcaatgtgcacttcactggagagaaagaactggaatttcgctctggaggggatgtggaccacagtactctagtcaccctcttcaagcttttgggctatgacgtccatgttctatgtgaccagactgcacaggaaatgcaagagaaactgcagaattttgcacagttacctgcacaccgagtcacggactcctgcatcgtggcactcctctcgcatggtgtggagggcgccatctatggtgtggatgggaaactgctccagctccaagaggtttttcagctctttgacaacgccaactgcccaagcctacagaacaaaccaaaaatgttcttcatccaggcctgccgtggagatgagactgatcgtggggttgaccaacaagatggaaagaaccacgcaggatcccctgggtgcgaggagagtgatgccggtaaagaaaagttgccgaagatgagactgcccacgcgctcagacatgatatgcggctatgcctgcctcaaagggactgccgccatgcggaacaccaaacgaggttcctggtacatcgaggctcttgctcaagtgttttctgagcgggcttgtgatatgcacgtggccgacatgctggttaaggtgaacgcacttatcaaggatcgggaaggttatgctcctggcacagaattccaccggtgcaaggagatgtctgaatactgcagcactctgtgccgccacctctacctgttcccaggacaccctcccacatgatgtcacctccccatcatccacgccaagtggaagccactggaccacaggaggtgtgatagagcctttgatcttcaggatgcacggtttctgttctgccccctcagggatgtgggaatctcccagacttgtttcctgtgcccatcatctctgcctttgagtgtgggactccaggccagctccttttctgtgaagccctttgcctgtagagccagccttggttggacctattgccaggaatgtttcagctgcagttgaagagcctgacaagtgaagttgtaaacacagtgtggttatggggagagggcatataaattccccatatttgtgttcagttccagcttttgtagatggcactttagtgattgcttttattacattagttaagatgtctgagagaccatctcctatcttttatttcattcatatcctccgccctttttgtcctagagtgagagtttggaaggtgtccaaatttaatgtagacattatcttttggctctgaagaagcaaacatgactagagacgcaccttgctgcagtgtccagaagcggcctgtgcgttcccttcagtactgcagcgccacccagtggaaggacactcttggctcgtttgggctcaaggcaccgcagcctgtcagccaacattgccttgcatttgtaccttattgatctttgcccatggaagtctcaaagatctttcgttggttgtttctctgagctttgttactgaaatgagcctcgtggggagcatcagagaaggccaggaagaatggtgtgtttccctagactctgtaaccacctctctgtctttttccttcctgagaaacgtccatctctctcccttactattcccactttcattcaatcaacctgcacttcatatctagatttctagaaaagcttcctagcttatctccctgcttcatatctctcccttctttaccttcatttcatcctgttggctgctgccaccaaatctgtctagaatcctgctttacaggatcatgtaaatgctcaaagatgtaatgtagttctttgttcctgctttctctttcagtattaaactctcctttgatattatgtggcttttatttcagtgccatacatgttattgttttcaacctagaaacctttatccctgcttatctgaaacttcccaacttccctgttctttaagactttttttttttttttttttttttttgagacagagtctcgctctgtcgcccaggctggagggcagtggcacgatctcagctcactgcaagctccaactcccgggttcacgccattctcctgcctcagccttccaagtagctgggactacaggtgcccgccaccgtgcccggctaatttttttgtatttttagtagagacagggtttcaccatgttagccgggatggtcttgatctcctgacctcatgatccacccacctcagcctcccaaagtgttgggattacaggcgtgagccactgcgcccgggcaagacctttttttaaaaaaaaaaaaaaaaaaacttccattctttcttcctccagtctgttctcacataacagagtagttttggtttttaattttttttggttgtttgctgttttttgttttttaaggtgagttctcactatgtttctcagactggtctcgaactcctggcctcaagccatcttcccgcctcagcctctcaaatagctgggcttacaggcatgagccaccacacctggccaggatttggttgtttaaatataaatctgatcacccccctgcttagaacccttctgctttctattacccctcatttaaaatgtaaactcttcaccttggtttatgagaactggttcttgccttccccttgaacctcattaaatggtgatttcttgctaagctccagcccgagtggtctcctctcagcttctaattttgtgctctttcctgcccttttcctgggccttctcagctctccacccccaccactcttgactcaggtggtgtccttcttcctcaagtcttgacaattcccgggcccttcagtccctgagcagtctacttctgtgtctgtcaccacatcttgtcttttcccctcattgcatttattgcagtttatatatatgctacttttacttgttcatttctgtctcccctaccaggctgtaaatgagggcagaaaccttgtttgttttattcaccatcatgtaccaagtgcttggcacatagtgggccttcattaaatgtttgttgaataaaagagggaagaaggcaagccaaccttagctacaatcctaccttttgataaaatgttccttttgacaatatacacggattattatttgtactttgtttttccatgtgttttgcttttatccactggcatttttagctccttgaagacatatcatgtgtgagataacttccttcacatctcccatggtccctagcaaaatgctaggcctgtagtagtcaaggtgctcaataaatatttgtttgggtggtttgtgagccttgctgccaagtcctgcctttgggtcgacatagtatggaagtatttgagagagagaacctttccactcccactgccaggattttgtattgccatcgggtgccaaataaatgctcatatttattaaaaaaaaaaaaaaaaaaa

SEQ ID NO: 9 - DNA, 3927 bp, Homo sapiens
gggtggcctggtgtgtgggcgcggcagggcgcaggcgcaggcgcagtgtgcgtccgcgtctgaggggagggatgtgggggaagcgacggcccccggtttgtttgggctgtgggcggtgcgcagcggagagcccgggaaaagcgggaaatggcggcgccgagcgcggggtcttggtccaccttccagcacaaggagctgatggccgctgacaggggacgcaggatattgggagtgtgtggcatgcatcctcatcatcaggaaactctaaaaaagaaccgagtggtgctagccaaacagctgttgttgagcgaattgttagaacatcttctggagaaggacatcatcaccttggaaatgagggagctcatccaggccaaagtgggcagtttcagccagaatgtggaactcctcaacttgctgcctaagaggggtccccaagcttttgatgccttctgtgaagccttgcactcctgaattttatcaaacacacttccagctggcatataggttgcagtctcggcctcgtggcctagcactggtgttgagcaatgtgcacttcactggagagaaagaactggaatttcgctctggaggggatgtggaccacagtactctagtcaccctcttcaagcttttgggctatgacgtccatgttctatgtgaccagactgcacaggaaatgcaagagaaactgcagaattttgcacagttacctgcacaccgagtcacggactcctgcatcgtggcactcctctcgcatggtgtggagggcgccatctatggtgtggatgggaaactgctccagctccaagaggtttttcagctctttgacaacgccaactgcccaagcctacagaacaaaccaaaaatgttcttcatccaggcctgccgtggagatgagactgatcgtggggttgaccaacaagatggaaagaaccacgcaggatcccctgggtgcgaggagagtgatgccggtaaagaaaagttgccgaagatgagactgcccacgcgctcagacatgatatgcggctatgcctgcctcaaagggactgccgccatgcggaacaccaaacgaggttcctggtacatcgaggctcttgctcaagtgttttctgagcgggcttgtgatatgcacgtggccgacatgctggttaaggtgaacgcacttatcaaggatcgggaaggttatgctcctggcacagaattccaccggtgcaaggagatgtctgaatactgcagcactctgtgccgccacctctacctgttcccaggacaccctcccacatgatgtcacctccccatcatccacgccaagtggaagccactggaccacaggaggtgtgatagagcctttgatcttcaggatgcacggtttctgttctgccccctcagggatgtgggaatctcccagacttgtttcctgtgcccatcatctctgcctttgagtgtgggactccaggccagctccttttctgtgaagccctttgcctgtagagccagccttggttggacctattgccaggaatgtttcagctgcagttgaagagcctgacaagtgaagttgtaaacacagtgtggttatggggagagggcatataaattccccatatttgtgttcagttccagcttttgtagatggcactttagtgattgcttttattacattagttaagatgtctgagagaccatctcctatcttttatttcattcatatcctccgccctttttgtcctagagtgagagtttggaaggtgtccaaatttaatgtagacattatcttttggctctgaagaagcaaacatgactagagacgcaccttgctgcagtgtccagaagcggcctgtgcgttcccttcagtactgcagcgccacccagtggaaggacactcttggctcgtttgggctcaaggcaccgcagcctgtcagccaacattgccttgcatttgtaccttattgatctttgcccatggaagtctcaaagatctttcgttggttgtttctctgagctttgttactgaaatgagcctcgtggggagcatcagagaaggccaggaagaatggtgtgtttccctagactctgtaaccacctctctgtctttttccttcctgagaaacgtccatctctctcccttactattcccactttcattcaatcaacctgcacttcatatctagatttctagaaaagcttcctagcttatctccctgcttcatatctctcccttctttaccttcatttcatcctgttggctgctgccaccaaatctgtctagaatcctgctttacaggatcatgtaaatgctcaaagatgtaatgtagttctttgttcctgctttctctttcagtattaaactctcctttgatattatgtggcttttatttcagtgccatacatgttattgttttcaacctagaaacctttatccctgcttatctgaaacttcccaacttccctgttctttaagactttttttttttttttttttttttttgagacagagtctcgctctgtcgcccaggctggagggcagtggcacgatctcagctcactgcaagctccaactcccgggttcacgccattctcctgcctcagccttccaagtagctgggactacaggtgcccgccaccgtgcccggctaatttttttgtatttttagtagagacagggtttcaccatgttagccgggatggtcttgatctcctgacctcatgatccacccacctcagcctcccaaagtgttgggattacaggcgtgagccactgcgcccgggcaagacctttttttaaaaaaaaaaaaaaaaaaacttccattctttcttcctccagtctgttctcacataacagagtagttttggtttttaattttttttggttgtttgctgttttttgttttttaaggtgagttctcactatgtttctcagactggtctcgaactcctggcctcaagccatcttcccgcctcagcctctcaaatagctgggcttacaggcatgagccaccacacctggccaggatttggttgtttaaatataaatctgatcacccccctgcttagaacccttctgctttctattacccctcatttaaaatgtaaactcttcaccttggtttatgagaactggttcttgccttccccttgaacctcattaaatggtgatttcttgctaagctccagcccgagtggtctcctctcagcttctaattttgtgctctttcctgcccttttcctgggccttctcagctctccacccccaccactcttgactcaggtggtgtccttcttcctcaagtcttgacaattcccgggcccttcagtccctgagcagtctacttctgtgtctgtcaccacatcttgtcttttcccctcattgcatttattgcagtttatatatatgctacttttacttgttcatttctgtctcccctaccaggctgtaaatgagggcagaaaccttgtttgttttattcaccatcatgtaccaagtgcttggcacatagtgggccttcattaaatgtttgttgaataaaagagggaagaaggcaagccaaccttagctacaatcctaccttttgataaaatgttccttttgacaatatacacggattattatttgtactttgtttttccatgtgttttgcttttatccactggcatttttagctccttgaagacatatcatgtgtgagataacttccttcacatctcccatggtccctagcaaaatgctaggcctgtagtagtcaaggtgctcaataaatatttgtttgggtggtttgtgagccttgctgccaagtcctgcctttgggtcgacatagtatggaagtatttgagagagagaacctttccactcccactgccaggattttgtattgccatcgggtgccaaataaatgctcatatttattaaaaaaaaaaaaaaaaaaa

SEQ ID NO: 10 - DNA, 2044 bp, Homo sapiens
caaagacaaaataatttactagggaagcccttactaacgacccaacatccagacacaggtgagggagaagaaatttcctgacagccgaagagcaacaagtatcatgatggggtgctggattttgaatgagggtctctccaccatattagtactctcatggctgggaataaatttttatctgtttattgacacgttctactggtatgaagaggaggagtctttccattacacacgagttattttgggttcaacactggcttgggcacgagcatccgcactgtgcctgaattttaactgcatgctaattctaatacctgtcagtcgaaaccttatttcattcataagaggaacaagtatttgctgcagaggaccgtggaggaggcaattagacaaaaacctcagatttcacaaactggtcgcctatgggatagctgttaatgcaaccatccacatcgtggcgcatttcttcaacctggaacgctaccactggagccagtccgaggaggcccagggacttctggccgcactttccaagctgggcaacacccctaacgagagctacctcaaccctgtccggaccttccccacaaacacaaccactgaattgctaaggacaatagcaggcgtcaccggtctggtgatctctctggctttagtcttgatcatgacctcgtcaactgagttcatcagacaggcctcctatgagttgttctggtacacacaccatgttttcatcgtcttctttctcagcctggccatccatgggacgggtcggattgttcgaggccaaacccaagacagtctctctctgcacaacatcaccttctgtagagaccgctatgcagaatggcagacagtggcccaatgccccgtgcctcaattttctggcaaggaaccctcggcttggaaatggattttaggccctgtggtcttgtatgcatgtgaaagaataattaggttctggcgatttcaacaagaagttgtcattaccaaggtggtaagccacccctctggagtcctggaacttcacatgaaaaagcgtggctttaaaatggcgccagggcagtacatcttggtgcagtgcccagccatatcttcgctggagtggcaccccttcacccttacctctgccccccaggaagactttttcagcgtgcacatccgggcagcaggagactggacagcagcgctactggaggcctttggggcagagggacaggccctccaggagccctggagcctgccaaggctggcagtggacgggccctttggaactgccctgacagatgtatttcactacccagtgtgtgtgtgcgttgccgcggggatcggagtcactcccttcgctgctcttctgaaatctatatggtacaaatgcagtgaggcacagaccccactgaagctgagcaaggtgtatttctactggatttgccgggatgcaagagcttttgagtggtttgctgatctcttactctccctggaaacacggatgagtgagcaggggaaaactcactttctgagttatcatatatttcttaccggctgggatgaaaatcaggctcttcacatagctttacactgggacgaaaatactgacgtgattacaggcttaaagcagaagaccttctatgggaggcccaactggaacaatgagttcaagcagattgcctacaatcaccccagcagcagtattggcgtgttcttctgtggacctaaagctctctcgaggacacttcaaaagatgtgccacttgtattcatcagctgaccccagaggtgttcatttctattacaacaaggagagcttctagactttggaggtcaagtccaggcattgtgttttcaatcaagttattgattccaaagaactccaccaggaattcctgtgacggcctgttgatatgagctcccagttgggaactggtgaataataattaactattgtgaacagtacactataccatacttccttagcttataaataacatgtcatatacaacagaacaaaaacatttactgaaattaaaatatattatgtttctcca

SEQ ID NO: 11 - DNA, 716 bp, Homo sapiens
gaaacttggtgtccaggggaggcccccggcggctggagcgcggcggcagcgggcgcagaggccggagggagaggaggcgaggggcggcccgagcgcggggcgggagcgaggccagcggtcatgtgcccgtgccccctgcaccgcggccgcggccccccggccgtgtgcgcctgcagcgcgggtcgcctggggctgcgctcgtccgccgcgcagctcaccgccgcccggctcaaggcgctaggcgacgagctgcaccagcgcaccatgtggcggcgccgcgcgcggagccggagggcgccggcgcccggcgcgctccccacctactggccttggctgtgcgcggccgcgcaggtggcggcgctggcggcctggctgctcggcaggcggaacttgtaggaacgcggggcttcttggtggggccggagccgagacccagccggagcgagcaacaggttggtgaaaaccctgtgtccttggagaaagctggttcccgttttccagagggggagcccagagcttgaaaggccgcggttggcacttcgagaaggaagtggagagtaaagacagcgcctggagcgatcgtagaaacacagaatgggactggggaagccctttggaaatccagctgcagaaacagacaccccaatgctatttacatacagctctatatatataaaaaaagaaaatatgaatattaaaaaaaaaaaaaaaaaaaa

SEQ ID NO: 12 - DNA, 1492 bp, Homo sapiens
cgggcgacagcagggccgcggtgcagtgtccgacccgagagttgcggcctgagtcaccggccccgccctccggagccggacgctgcgggaggcccgggagcggcagtggaaccgactcccagaactccggacgtgtgcggcgcagtgagtcgcagccatgttcctggttaactcgttcttgaagggcggcggcggcggcggcgggggaggcgggggcctgggtgggggcctgggaaatgtgcttggaggcctgatcagcggggccgggggcggcggcggcggcggcggcggcggcggcggtggtggaggcggcggtggcggtggaacggccatgcgcatcctaggcggagtcatcagcgccatcagcgaggcggctgcgcagtacaacccggagcccccgcccccacgcacacattactccaacattgaggccaacgagagtgaggaggtccggcagttccggagactctttgcccagctggctggagatgacatggaggtcagcgccacagaactcatgaacattctcaataaggttgtgacacgacaccctgatctgaagactgatggttttggcattgacacatgtcgcagcatggtggccgtgatggatagcgacaccacaggcaagctgggctttgaggaattcaagtacttgtggaacaacatcaaaaggtggcaggccatatacaaacagttcgacactgaccgatcagggaccatttgcagtagtgaactcccaggtgcctttgaggcagcagggttccacctgaatgagcatctctataacatgatcatccgacgctactcagatgaaagtgggaacatggattttgacaacttcatcagctgcttggtcaggctggacgccatgttccgtgccttcaaatctcttgacaaagatggcactggacaaatccaggtgaacatccaggagtggctgcagctgactatgtattcctgaactggagccccagacccgccccctcactgccttgctataggagtcacctggagcctcggtctctcccagggccgatcctgtctgcagtcacatctttgtggggcctgctgacccacaagcttttgttctctcagtacttgttacccagcttctcaacatccagggcccaatttgccctgcctggagttccccctggctctaggacactctaacaagctctgtccacgggtctccccattcccaccaggccctgcacacacccactccgtaacctctcccctgtacctgtgccaagcctagcacttgtgatgcctccatgccccgagggccctctctcagttctgggaggatgactccagtccctgcacgccctggcacacccttcacggttgctacccaggcggccaagctccagaccgtgccagacccaggtgccccagtgcctttgtctatattctgctcccagcctgccaggcccaggaggaaataaacatgccccagttgctgatctctaaaaaaaaaaaaaaa

SEQ ID NO: 13 - DNA, 1489 bp, Homo sapiens
cgggcgacagcagggccgcggtgcagtgtccgacccgagagttgcggcctgagtcaccggccccgccctccggagccggacgctgcgggaggcccgggagcggcagtggaaccgactcccagaactccggacgtgtgcggcgtgagtcgcagccatgttcctggttaactcgttcttgaagggcggcggcggcggcggcgggggaggcgggggcctgggtgggggcctgggaaatgtgcttggaggcctgatcagcggggccgggggcggcggcggcggcggcggcggcggcggcggtggtggaggcggcggtggcggtggaacggccatgcgcatcctaggcggagtcatcagcgccatcagcgaggcggctgcgcagtacaacccggagcccccgcccccacgcacacattactccaacattgaggccaacgagagtgaggaggtccggcagttccggagactctttgcccagctggctggagatgacatggaggtcagcgccacagaactcatgaacattctcaataaggttgtgacacgacaccctgatctgaagactgatggttttggcattgacacatgtcgcagcatggtggccgtgatggatagcgacaccacaggcaagctgggctttgaggaattcaagtacttgtggaacaacatcaaaaggtggcaggccatatacaaacagttcgacactgaccgatcagggaccatttgcagtagtgaactcccaggtgcctttgaggcagcagggttccacctgaatgagcatctctataacatgatcatccgacgctactcagatgaaagtgggaacatggattttgacaacttcatcagctgcttggtcaggctggacgccatgttccgtgccttcaaatctcttgacaaagatggcactggacaaatccaggtgaacatccaggagtggctgcagctgactatgtattcctgaactggagccccagacccgccccctcactgccttgctataggagtcacctggagcctcggtctctcccagggccgatcctgtctgcagtcacatctttgtggggcctgctgacccacaagcttttgttctctcagtacttgttacccagcttctcaacatccagggcccaatttgccctgcctggagttccccctggctctaggacactctaacaagctctgtccacgggtctccccattcccaccaggccctgcacacacccactccgtaacctctcccctgtacctgtgccaagcctagcacttgtgatgcctccatgccccgagggccctctctcagttctgggaggatgactccagtccctgcacgccctggcacacccttcacggttgctacccaggcggccaagctccagaccgtgccagacccaggtgccccagtgcctttgtctatattctgctcccagcctgccaggcccaggaggaaataaacatgccccagttgctgatctctaaaaaaaaaaaaaaa

SEQ ID NO: 14 - DNA, 1752 bp, Homo sapiens
agggcgcagcaggccaagggggaggtgcgagcgtggacctgggacgggtctgggcggctctcggtggttggcacgggttcgcacacccattcaagcggcaggacgcacttgtcttagcagttctcgctgaccgcgctagctgcggcttctacgctccggcactctgagttcatcagcaaacgccctggcgtctgtcctcaccatgcctagcctttgggaccgcttctcgtcgtcgtccacctcctcttcgccctcgtccttgccccgaactcccaccccagatcggccgccgcgctcagcctgggggtcggcgacccgggaggaggggtttgaccgctccacgagcctggagagctcggactgcgagtccctggacagcagcaacagtggcttcgggccggaggaagacacggcttacctggatggggtgtcgttgcccgacttcgagctgctcagtgaccctgaggatgaacacttgtgtgccaacctgatgcagctgctgcaggagagcctggcccaggcgcggctgggctctcgacgccctgcgcgcctgctgatgcctagccagttggtaagccaggtgggcaaagaactactgcgcctggcctacagcgagccgtgcggcctgcggggggcgctgctggacgtctgcgtggagcagggcaagagctgccacagcgtgggccagctggcactcgaccccagcctggtgcccaccttccagctgaccctcgtgctgcgcctggactcacgactctggcccaagatccaggggctgtttagctccgccaactctcccttcctccctggcttcagccagtccctgacgctgagcactggcttccgagtcatcaagaagaagctgtacagctcggaacagctgctcattgaggagtgttgaacttcaacctgagggggccgacagtgccctccaagacagagacgactgaacttttggggtggagactagaggcaggagctgagggactgattcctgtggttggaaaactgaggcagccacctaaggtggaggtgggggaatagtgtttcccaggaagctcattgagttgtgtgcgggtggctgtgcattggggacacatacccctcagtactgtagcatgaaacaaaggcttaggggccaacaaggcttccagctggatgtgtgtgtagcatgtaccttattatttttgttactgacagttaacagtggtgtgacatccagagagcagctgggctgctcccgccccagcccggcccagggtgaaggaagaggcacgtgctcctcagagcagccggagggaggggggaggtcggaggtcgtggaggtggtttgtgtatcttactggtctgaagggaccaagtgtgtttgttgtttgttttgtatcttgtttttctgatcggagcatcactactgacctgttgtaggcagctatcttacagacgcatgaatgtaagagtaggaaggggtgggtgtcagggatcacttgggatctttgacacttgaaaaattacacctggcagctgcgtttaagccttcccccatcgtgtactgcagagttgagctggcaggggaggggctgagagggtgggggctggaacccctccccgggaggagtgccatctgggtcttccatctagaactgtttacatgaagataagatactcactgttcatgaatacacttgatgttcaagtattaagacctatgcaatattttttacttttctaataaacatgtttgttaaaacagtt

SEQ ID NO: 15 - DNA, 2607 bp, Homo sapiens
agccggcgcagggtggccggggaggggtgagcagggtgccgctggctgctggggtctgcaggtcaccgagtccccaggagaggggactcctaagaagccacctgcctgtgtttacccggcagcgagcgcgcaggcccccgcgaactcctggcagcgctcaggaaaggccgttgcgcctcgcgaaggaaacagagccgttgaccatggttgcaactggcagtttgagcagcaagaacccggccagcatttcagaattgctggactgtggctatcacccagagagcctgctaagtgattttgactactgggattatgttgttcctgaacccaacctcaacgaggtaatatttgaggaatcaacttgccagaatttggttaaaatgctggagaactgtctgtccaaatcaaagcaaactaaacttggttgctcaaaggtccttgtccctgagaaactgacccagagaattgctcaagatgtcctgcggctttcctcaacggagccctgcggcttgcgaggttgtgttatgcacgtgaacttggaaattgaaaatgtatgtaaaaagctggataggattgtgtgtgattctagcgtcgtacctacttttgagcttacacttgtgtttaagcaggagaactgctcatggactagcttcagggactttttctttagtagaggtcgcttctcctctggtttcaggagaactctgatcctcagctcaggatttcgacttgttaagaaaaaactttactcactgattggaacaacagtgattgaagggtcctaaaaagggaaaatatataaagattatttcatgattgggtagtaaaactattcagctagtcagctaaagtcatttgtagtttgccccacctgccctaaataagaaaccccaaatgtagtctcttttctttctgtgtttcacattcatagcaactgcagctaacaggctgattttctggcctttggagaagtgattcaaaatagtgtagattttctgcatagatcccatttttgtacagaattgaatgggatggaataggtaagcaaaagtagaagcccatttgagttttacatttgattccacaatttggtttcaggtaggcttggtaatagactatataaaccagatttgcctattttgattttcatatggcttttttttctctaagttttcagaggattttttaaatcacagaatcatactaaatgatatttagcctatcaaaacttccaaaagcccacaccaccagttcctgactcaaatttgaagggtttttagacaggaaggtaggattaagtaggtgagtttaattaaagcttaaccctaggtaagagtaaatgagaaatattacggcaataatggaactgcttcactgtttcttggtgacttcctcactctaatgttttaaagaggcaacaaaagcttgtggtgccatttcagtaaccacggtgttgttttagatgcctttataagctcagtttcccctgttcttaagtgttgaatactgtctttaaactagaaaaatgcaaaatattgaactgatatttttgtgtgtagttgattactcttccattgagtgaatgatgaatacctgtgaggataggaaattagttctgagatctagtccctctctgattcacttagtaatctatcctcttttcagtattacatgtgcttaatctcagatgaaccatttcaccatggcagtgttatctcatctctgggcttttctgggaattgaagtatctctccttaaccccaattgtcaagggtagtagctgtatactaccactttgaattattgaaacgggtcaatttacgaagtctgcattggctatggagatatggtttatagtacagcctagagaatgaaactcaccgtccagataaccatgcatgcacccagattttttccaccttggatacctgtcactagggaataataaaggccttattttttgtcttattccaactaagtagatcattatctctttccttttttatgttaatgagagaatttagcctccactcaacaatgttcaattcagcaaggctttcatatccttgctgtgggtcgtggataaggagcttattcaggtttcctgccctagctattagctccacttcacatgctggagaccggcgtagggacagatgtattcatcctggtgttactgaaaaacaggtgtgatcctgttactgatactataagtgacctaaaatgtcactgttcaaattagccagtgttctaacaaactaaactcttcaaatgcttggaaagatactacaaagccaatctttatagaattgggccaagataaatcaatgttgttttgcatgtctattgttaagctccaaaggttcactgtgtttctgccgctgtcctggagttgtcaccactgactgggcaaggcttcttgggcatcgatgtagaactgttgtcctttttccactaacagttatctttgactctcttgcctgttatgcttacaaaatggtgatggcttatggaaggctgttaaattaatattcctgttaaaggaaattaaagtttgtctatttttgacaataaaacattatatatttttaaaaaaaaaaaaaaaaa

SEQ ID NO: 16 - DNA, 9309 bp, Homo sapiens
atgccgccgctcctggcgcccctgctctgcctggcgctgctgcccgcgctcgccgcacgaggcccgcgatgctcccagcccggtgagacctgcctgaatggcgggaagtgtgaagcggccaatggcacggaggcctgcgtctgtggcggggccttcgtgggcccgcgatgccaggaccccaacccgtgcctcagcaccccctgcaagaacgccgggacatgccacgtggtggaccgcagaggcgtggcagactatgcctgcagctgtgccctgggcttctctgggcccctctgcctgacacccctggacaatgcctgcctcaccaacccctgccgcaacgggggcacctgcgacctgctcacgctgacggagtacaagtgccgctgcccgcccggctggtcagggaaatcgtgccagcaggctgacccgtgcgcctccaacccctgcgccaacggtggccagtgcctgcccttcgaggcctcctacatctgccactgcccacccagcttccatggccccacctgccggcaggatgtcaacgagtgtggccagaagcccgggctttgccgccacggaggcacctgccacaacgaggtcggctcctaccgctgcgtctgccgcgccacccacactggccccaactgcgagcggccctacgtgccctgcagcccctcgccctgccagaacgggggcacctgccgccccacgggcgacgtcacccacgagtgtgcctgcctgccaggcttcaccggccagaactgtgaggaaaatatcgacgattgtccaggaaacaactgcaagaacgggggtgcctgtgtggacggcgtgaacacctacaactgccgctgcccgccagagtggacaggtcagtactgtaccgaggatgtggacgagtgccagctgatgccaaatgcctgccagaacggcgggacctgccacaacacccacggtggctacaactgcgtgtgtgtcaacggctggactggtgaggactgcagcgagaacattgatgactgtgccagcgccgcctgcttccacggcgccacctgccatgaccgtgtggcctccttctactgcgagtgtccccatggccgcacaggtctgctgtgccacctcaacgacgcatgcatcagcaacccctgtaacgagggctccaactgcgacaccaaccctgtcaatggcaaggccatctgcacctgcccctcggggtacacgggcccggcctgcagccaggacgtggatgagtgctcgctgggtgccaacccctgcgagcatgcgggcaagtgcatcaacacgctgggctccttcgagtgccagtgtctgcagggctacacgggcccccgatgcgagatcgacgtcaacgagtgcgtctcgaacccgtgccagaacgacgccacctgcctggaccagattggggagttccagtgcatctgcatgcccggctacgagggtgtgcactgcgaggtcaacacagacgagtgtgccagcagcccctgcctgcacaatggccgctgcctggacaagatcaatgagttccagtgcgagtgccccacgggcttcactgggcatctgtgccagtacgatgtggacgagtgtgccagcaccccctgcaagaatggtgccaagtgcctggacggacccaacacttacacctgtgtgtgcacggaagggtacacggggacgcactgcgaggtggacatcgatgagtgcgaccccgacccctgccactacggctcctgcaaggacggcgtcgccaccttcacctgcctctgccgcccaggctacacgggccaccactgcgagaccaacatcaacgagtgctccagccagccctgccgccacgggggcacctgccaggaccgcgacaacgcctacctctgcttctgcctgaaggggaccacaggacccaactgcgagatcaacctggatgactgtgccagcagcccctgcgactcgggcacctgtctggacaagatcgatggctacgagtgtgcctgtgagccgggctacacagggagcatgtgtaacatcaacatcgatgagtgtgcgggcaacccctgccacaacgggggcacctgcgaggacggcatcaatggcttcacctgccgctgccccgagggctaccacgaccccacctgcctgtctgaggtcaatgagtgcaacagcaacccctgcgtccacggggcctgccgggacagcctcaacgggtacaagtgcgactgtgaccctgggtggagtgggaccaactgtgacatcaacaacaatgagtgtgaatccaacccttgtgtcaacggcggcacctgcaaagacatgaccagtggctacgtgtgcacctgccgggagggcttcagcggtcccaactgccagaccaacatcaacgagtgtgcgtccaacccatgtctgaaccagggcacgtgtattgacgacgttgccgggtacaagtgcaactgcctgctgccctacacaggtgccacgtgtgaggtggtgctggccccgtgtgcccccagcccctgcagaaacggcggggagtgcaggcaatccgaggactatgagagcttctcctgtgtctgccccacgggctggcaagggcagacctgtgaggtcgacatcaacgagtgcgttctgagcccgtgccggcacggcgcatcctgccagaacacccacggcggctaccgctgccactgccaggccggctacagtgggcgcaactgcgagaccgacatcgacgactgccggcccaacccgtgtcacaacgggggctcctgcacagacggcatcaacacggccttctgcgactgcctgcccggcttccggggcactttctgtgaggaggacatcaacgagtgtgccagtgacccctgccgcaacggggccaactgcacggactgcgtggacagctacacgtgcacctgccccgcaggcttcagcgggatccactgtgagaacaacacgcctgactgcacagagagctcctgcttcaacggtggcacctgcgtggacggcatcaactcgttcacctgcctgtgtccacccggcttcacgggcagctactgccagcacgatgtcaatgagtgcgactcacagccctgcctgcatggcggcacctgtcaggacggctgcggctcctacaggtgcacctgcccccagggctacactggccccaactgccagaaccttgtgcactggtgtgactcctcgccctgcaagaacggcggcaaatgctggcagacccacacccagtaccgctgcgagtgccccagcggctggaccggcctttactgcgacgtgcccagcgtgtcctgtgaggtggctgcgcagcgacaaggtgttgacgttgcccgcctgtgccagcatggagggctctgtgtggacgcgggcaacacgcaccactgccgctgccaggcgggctacacaggcagctactgtgaggacctggtggacgagtgctcacccagcccctgccagaacggggccacctgcacggactacctgggcggctactcctgcaagtgcgtggccggctaccacggggtgaactgctctgaggagatcgacgagtgcctctcccacccctgccagaacgggggcacctgcctcgacctccccaacacctacaagtgctcctgcccacggggcactcagggtgtgcactgtgagatcaacgtggacgactgcaatccccccgttgaccccgtgtcccggagccccaagtgctttaacaacggcacctgcgtggaccaggtgggcggctacagctgcacctgcccgccgggcttcgtgggtgagcgctgtgagggggatgtcaacgagtgcctgtccaatccctgcgacgcccgtggcacccagaactgcgtgcagcgcgtcaatgacttccactgcgagtgccgtgctggtcacaccgggcgccgctgcgagtccgtcatcaatggctgcaaaggcaagccctgcaagaatgggggcacctgcgccgtggcctccaacaccgcccgcgggttcatctgcaagtgccctgcgggcttcgagggcgccacgtgtgagaatgacgctcgtacctgcggcagcctgcgctgcctcaacggcggcacatgcatctccggcccgcgcagccccacctgcctgtgcctgggccccttcacgggccccgaatgccagttcccggccagcagcccctgcctgggcggcaacccctgctacaaccaggggacctgtgagcccacatccgagagccccttctaccgttgcctgtgccccgccaaattcaacgggctcttgtgccacatcctggactacagcttcgggggtggggccgggcgcgacatccccccgccgctgatcgaggaggcgtgcgagctgcccgagtgccaggaggacgcgggcaacaaggtctgcagcctgcagtgcaacaaccacgcgtgcggctgggacggcggtgactgctccctcaacttcaatgacccctggaagaactgcacgcagtctctgcagtgctggaagtacttcagtgacggccactgtgacagccagtgcaactcagccggctgcctcttcgacggctttgactgccagcgtgcggaaggccagtgcaaccccctgtacgaccagtactgcaaggaccacttcagcgacgggcactgcgaccagggctgcaacagcgcggagtgcgagtgggacgggctggactgtgcggagcatgtacccgagaggctggcggccggcacgctggtggtggtggtgctgatgccgccggagcagctgcgcaacagctccttccacttcctgcgggagctcagccgcgtgctgcacaccaacgtggtcttcaagcgtgacgcacacggccagcagatgatcttcccctactacggccgcgaggaggagctgcgcaagcaccccatcaagcgtgccgccgagggctgggccgcacctgacgccctgctgggccaggtgaaggcctcgctgctccctggtggcagcgagggtgggcggcggcggagggagctggaccccatggacgtccgcggctccatcgtctacctggagattgacaaccggcagtgtgtgcaggcctcctcgcagtgcttccagagtgccaccgacgtggccgcattcctgggagcgctcgcctcgctgggcagcctcaacatcccctacaagatcgaggccgtgcagagtgagaccgtggagccgcccccgccggcgcagctgcacttcatgtacgtggcggcggccgcctttgtgcttctgttcttcgtgggctgcggggtgctgctgtcccgcaagcgccggcggcagcatggccagctctggttccctgagggcttcaaagtgtctgaggccagcaagaagaagcggcgggagcccctcggcgaggactccgtgggcctcaagcccctgaagaacgcttcagacggtgccctcatggacgacaaccagaatgagtggggggacgaggacctggagaccaagaagttccggttcgaggagcccgtggttctgcctgacctggacgaccagacagaccaccggcagtggactcagcagcacctggatgccgctgacctgcgcatgtctgccatggcccccacaccgccccagggtgaggttgacgccgactgcatggacgtcaatgtccgcgggcctgatggcttcaccccgctcatgatcgcctcctgcagcgggggcggcctggagacgggcaacagcgaggaagaggaggacgcgccggccgtcatctccgacttcatctaccagggcgccagcctgcacaaccagacagaccgcacgggcgagaccgccttgcacctggccgcccgctactcacgctctgatgccgccaagcgcctgctggaggccagcgcagatgccaacatccaggacaacatgggccgcaccccgctgcatgcggctgtgtctgccgacgcacaaggtgtcttccagatcctgatccggaaccgagccacagacctggatgcccgcatgcatgatggcacgacgccactgatcctggctgcccgcctggccgtggagggcatgctggaggacctcatcaactcacacgccgacgtcaacgccgtagatgacctgggcaagtccgccctgcactgggccgccgccgtgaacaatgtggatgccgcagttgtgctcctgaagaacggggctaacaaagatatgcagaacaacagggaggagacacccctgtttctggccgcccgggagggcagctacgagaccgccaaggtgctgctggaccactttgccaaccgggacatcacggatcatatggaccgcctgccgcgcgacatcgcacaggagcgcatgcatcacgacatcgtgaggctgctggacgagtacaacctggtgcgcagcccgcagctgcacggagccccgctggggggcacgcccaccctgtcgcccccgctctgctcgcccaacggctacctgggcagcctcaagcccggcgtgcagggcaagaaggtccgcaagcccagcagcaaaggcctggcctgtggaagcaaggaggccaaggacctcaaggcacggaggaagaagtcccaggacggcaagggctgcctgctggacagctccggcatgctctcgcccgtggactccctggagtcaccccatggctacctgtcagacgtggcctcgccgccactgctgccctccccgttccagcagtctccgtccgtgcccctcaaccacctgcctgggatgcccgacacccacctgggcatcgggcacctgaacgtggcggccaagcccgagatggcggcgctgggtgggggcggccggctggcctttgagactggcccacctcgtctctcccacctgcctgtggcctctggcaccagcaccgtcctgggctccagcagcggaggggccctgaatttcactgtgggcgggtccaccagtttgaatggtcaatgcgagtggctgtcccggctgcagagcggcatggtgccgaaccaatacaaccctctgcgggggagtgtggcaccaggccccctgagcacacaggccccctccctgcagcatggcatggtaggcccgctgcacagtagccttgctgccagcgccctgtcccagatgatgagctaccagggcctgcccagcacccggctggccacccagcctcacctggtgcagacccagcaggtgcagccacaaaacttacagatgcagcagcagaacctgcagccagcaaacatccagcagcagcaaagcctgcagccgccaccaccaccaccacagccgcaccttggcgtgagctcagcagccagcggccacctgggccggagcttcctgagtggagagccgagccaggcagacgtgcagccactgggccccagcagcctggcggtgcacactattctgccccaggagagccccgccctgcccacgtcgctgccatcctcgctggtcccacccgtgaccgcagcccagttcctgacgcccccctcgcagcacagctactcctcgcctgtggacaacacccccagccaccagctacaggtgcctgagcaccccttcctcaccccgtcccctgagtcccctgaccagtggtccagctcgtccccgcattccaacgtctccgactggtccgagggcgtctccagccctcccaccagcatgcagtcccagatcgcccgcattccggaggccttcaagtaaacggcgcgccccacgagaccccggcttcctttcccaagccttcgggcgtctgtgtgcgctctgtggatgccagggccgaccagaggagcctttttaaaacacatgtttttatacaaaataagaacgaggattttaattttttttagtatttatttatgtacttttattttacacagaaacactgcctttttatttatatgtactgttttatctggccccaggtagaaacttttatctattctgagaaaacaagcaagttctgagagccagggttttcctacgtaggatgaaaagattcttctgtgtttataaaatataaacaaagattcatgatttataaatgccatttatttattgattccttttttcaaaatccaaaaagaaatgatgttggagaagggaagttgaacgagcatagtccaaaaagctcctggggcgtccaggccgcgccctttccccgacgcccacccaaccccaagccagcccggccgctccaccagcatcacctgcctgttaggagaagctgcatccagaggcaaacggaggcaaagctggctcaccttccgcacgcggattaatttgcatctgaaataggaaacaagtgaaagcatatgggttagatgttgccatgtgttttagatggtttcttgcaagcatgcttgtgaaaatgtgttctcggagtgtgtatgccaagagtgcacccatggtaccaatcatgaatctttgtttcaggttcagtattatgtagttgttcgttggttatacaagttcttggtccctccagaaccaccccggccccctgcccgttcttgaaatgtaggcatcatgcatgtcaaacatgagatgtgtggactgtggcacttgcctgggtcacacacggaggcatcctacccttttctggggaaagacactgcctgggctgaccccggtggcggccccagcacctcagcctgcacagtgtcccccaggttccgaagaagatgctccagcaacacagcctgggccccagctcgcgggacccgaccccccgtgggctcccgtgttttgtaggagacttgccagagccgggcacattgagctgtgcaacgccgtgggctgcgtcctttggtcctgtccccgcagccctggcagggggcatgcggtcgggcaggggctggagggaggcgggggctgcccttgggccacccctcctagtttgggaggagcagatttttgcaataccaagtatagcctatggcagaaaaaatgtctgtaaatatgtttttaaaggtggattttgtttaaaaaatcttaatgaatgagtctgttgtgtgtcatgccagtgagggacgtcagacttggctcagctcggggagccttagccgcccatgcactggggacgctccgctgccgtgccgcctgcactcctcagggcagcctcccccggctctacgggggccgcgtggtgccatccccagggggcatgaccagatgcgtcccaagatgttgatttttactgtgttttataaaatagagtgtagtttacagaaaaagactttaaaagtgatctacatgaggaactgtagatgatgtatttttttcatcttttttgttaactgatttgcaataaaaatgatactgatggtgaaaaaaaaaaaaaaa

SEQ ID NO: 17 - DNA, 2413 bp, Homo sapiens
gggaggccggatgtgagtggagcggccatttcctgtttctctgcagttttcctcagctttgggtggtggccgctgccgggcatcggcttccagtccgcggagggcgaggcggcgtggacagcggccccggcacccagcgccccgccgcccgcaagccgcgcgcccgtccgccgcgccccgagcccgccgcttcctatctcagcgccctgccgccgccgccgcggcccagcgagcggccctgatgcaggccatcaagtgtgtggtggtgggagacggaaacaagaatctcagtgtaacccgagcaaaatcgcgcgtctcagcgttgcttgtatagagctgtaggtaaaacttgcctactgatcagttacacaaccaatgcatttcctggagaatatatccctactgtctttgacaattattctgccaatgttatggtagatggaaaaccggtgaatctgggcttatgggatacagctggacaagaagattatgacagattacgccccctatcctatccgcaaacagatgtgttcttaatttgcttttcccttgtgagtcctgcatcatttgaaaatgtccgtgcaaagtggtatcctgaggtgcggcaccactgtcccaacactcccatcatcctagtgggaactaaacttgatcttagggatgataaagacacgatcgagaaactgaaggagaagaagctgactcccatcacctatccgcagggtctagccatggctaaggagattggtgctgtaaaatacctggagtgctcggcgctcacacagcgaggcctcaagacagtgtttgacgaagcgatccgagcagtcctctgcccgcctcccgtgaagaagaggaagagaaaatgcctgctgttgtaaatgtctcagcccctcgttcttggtcctgtcccttggaacctttgtacgctttgctcaaaaaaaaacaaaaaaaaaaaacaaaaaaaaaaaacaacggtggagccttcgcactcaatgccaactttttgttacagattaatttttccataaaaccattttttgaaccaatcagtaattttaaggttttgtttgttctaaatgtaagagttcagactcacattctattaaaatttagccctaaaatgacaagccttcttaaagccttatttttcaaaagcgccccccccattcttgttcagattaagagttgccaaaataccttctgaactacactgcattgttgtgccgagaacaccgagcactgaactttgcaaagaccttcgtctttgagaagacggtagcttctgcagttaggaggtgcagacacttgctctcctatgtagttctcagatgcgtaaagcagaacagcctcccgaatgaagcgttgccattgaactcaccagtgagttagcagcacgtgttcccgacataacattgtactgtaatggagtgagcgtagcagctcagctctttggatcagtctttgtgatttcatagcgagttttctgaccagcttttgcggagattttgaacagaactgctatttcctctaatgaagaattctgtttagctgtgggtgtgccgggtggggtgtgtgtgatcaaaggacaaagacagtattttgacaaaatacgaagtggagatttacactacattgtacaaggaatgaaagtgtcacgggtaaaaactctaaaaggttaatttctgtcaaatgcagtagatgatgaaagaaaggttggtattatcaggaaatgttttcttaagcttttcctttctcttacacctgccatgcctccccaaattgggcatttaattcatctttaaactggttgttctgttagtcgctaacttagtaagtgcttttcttatagaaccccttctgactgagcaatatgcctccttgtattataaaatctttctgataatgcattagaaggtttttttgtcgattagtaaaagtgctttccatgttactttattcagagctaataagtgctttccttagttttctagtaactaggtgtaaaaatcatgtgttgcagctttatagtttttaaaatattttagataattcttaaactatgaaccttcttaacatcactgtcttgccagattaccgacactgtcacttgaccaatactgaccctctttacctcgcccacgcggacacacgcctcctgtagtcgctttgcctattgatgttcctttgggtctgtgaggttctgtaaactgtgctagtgctgacgatgttctgtacaacttaactcactggcgagaatacagcgtgggacccttcagccactacaacagaattttttaaattgacagttgcagaattgtggagtgtttttacattgatcttttgctaatgcaattagcattatgttttgcatgtatgacttaataaatccttgaatcataaaaaaaaaaaaaaa

SEQ ID NO: 18 - DNA, 636 bp, Homo sapiens
atgcaggccatcaagtgtgtggtggtgggagacggagctgtaggtaaaacttgcctactgatcagttacacaaccaatgcatttcctggagaatatatccctactgtctttgacaattattctgccaatgttatggtagatggaaaaccggtgaatctgggcttatgggatacagctggacaagaagattatgacagattacgccccctatcctatccgcaaacagttggagaaacgtacggtaaggatataacctcccggggcaaagacaagccgattgccgatgtgttcttaatttgcttttcccttgtgagtcctgcatcatttgaaaatgtccgtgcaaagtggtatcctgaggtgcggcaccactgtcccaacactcccatcatcctagtgggaactaaacttgatcttagggatgataaagacacgatcgagaaactgaaggagaagaagctgactcccatcacctatccgcagggtctagccatggctaaggagattggtgctgtaaaatacctggagtgctcggcgctcacacagcgaggcctcaagacagtgtttgacgaagcgatccgagcagtcctctgcccgcctcccgtgaagaagaggaagagaaaatgcctgctgttgtaa

SEQ ID NO: 19 - DNA, 579 bp, Homo sapiens
atgcaggccatcaagtgtgtggtggtgggagacggagctgtaggtaaaacttgcctactgatcagttacacaaccaatgcatttcctggagaatatatccctactgtctttgacaattattctgccaatgttatggtagatggaaaaccggtgaatctgggcttatgggatacagctggacaagaagattatgacagattacgccccctatcctatccgcaaacagatgtgttcttaatttgcttttcccttgtgagtcctgcatcatttgaaaatgtccgtgcaaagtggtatcctgaggtgcggcaccactgtcccaacactcccatcatcctagtgggaactaaacttgatcttagggatgataaagacacgatcgagaaactgaaggagaagaagctgactcccatcacctatccgcagggtctagccatggctaaggagattggtgctgtaaaatacctggagtgctcggcgctcacacagcgaggcctcaagacagtgtttgacgaagcgatccgagcagtcctctgcccgcctcccgtgaagaagaggaagagaaaatgcctgctgttgtaa

SEQ ID NO: 20 - DNA, 1471 bp, Homo sapiens
atcacacaggatccggagctggtgctgataacagcggaatcccccgtctacctctctccttggtcctggaacagcgctactgatcaccaagtagccacaaaatataataaaccctcagcacttgctcagtagttttgtgaaagtctcaagtaaaagagacacaaacaaaaaattctttttcgtgaagaactccaaaaataaaattctctagagataaaaaaaaaaaaaaaaggaaaatgccagctgatataatggagaaaaattcctcgtccccggtggctgctaccccagccagtgtcaacacgacaccggataaaccaaagacagcatctgagcacagaaagtcatcaaagcctattatggagaaaagacgaagagcaagaataaatgaaagtctgagccagctgaaaacactgattttggatgctctgaagaaagatagctcgcggcattccaagctggagaaggcggacattctggaaatgacagtgaagcacctccggaacctgcagcgggcgcagatgacggctgcgctgagcacagacccaagtgtgctggggaagtaccgagccggcttcagcgagtgcatgaacgaggtgacccgcttcctgtccacgtgcgagggcgttaataccgaggtgcgcactcggctgctcggccacctggccaactgcatgacccagatcaatgccatgacctaccccgggcagccgcaccccgccttgcaggcgccgccaccgcccccaccgggacccggcggcccccagcacgcgccgttcgcgccgccgccgccactcgtgcccatccccgggggcgcggcgccccctcccggcggcgccccctgcaagctgggcagccaggctggagaggcggctaaggtgtttggaggcttccaggtggtaccggctcccgatggccagtttgctttcctcattcccaacggggccttcgcgcacagcggccctgtcatccccgtctacaccagcaacagcggcacctccgtgggccccaacgcagtgtcaccttccagcggcccctcgcttacggcggactccatgtggaggccgtggcggaactgagggggctcaggccacccctcctcctaaactccccaacccacctctcttccctccggactctaaacaggaacttgaatactgggagagaagaggacttttttgattaagtggttactttgtgtttttttaatttctaagaagttactttttgtagagagagctgtattaagtgactgaccatgcactatatttgtatatattttatatgttcatattggattgcgcctttgtattataaaagctcagatgacatttcgttttttacacgagatttcttttttatgtgatgccaaagatgtttgaaaatgctcttaaaatatcttcctttggggaagtttatttgagaaaatataataaaagaaaaaagtaaaggcaaaaaaaaaaaaaaaaaa

SEQ ID NO: 21 - DNA, 1319 bp, Homo sapiens
cgcgcttggccttgcccgcgcccgctcgcctcgtctcgcccggcctccccgcgtcgcctcgtcgcctgttccgcgccaggcatggcccccagcactgtggccgtggagctgctcagccccaaagagaaaaaccgactgcggaagccggtggtggagaagatgcgccgcgaccgcatcaacagcagcatcgagcagctgaagctgctgctggagcaggagttcgcgcggcaccagcccaactccaagctggagaaggccgacatcctggagatggctgtcagctacctgaagcacagcaaagccttcgtcgccgccgccggccccaagagcctgcaccaggactacagcgaaggctactcgtggtgcctgcaggaggccgtgcagttcctgacgctccacgccgccagcgacacgcagatgaagctgctgtaccacttccagcggcccccggccgcgcccgccgcgcccgccaaggagcccaaggcgccgggcgccgcgcccccgcccgcgctctccgccaaggccaccgccgccgccgccgccgcgcaccagcccgcctgcggcctctggcggccctggtgacccggcgggacctgcgggcgcgcggcccgacgaccagagggcgagcctgctcctctcgcctgtagggaagcgccttcccgccgtcgtccgccccgggcttggacgcgcccttctccggaaggctctggccccaagctggccggcccgcaggagccccattctcagagaatgtgtgtgcagagtccctgccgttttaggacaatcagggcccatcttctgccaagtgtctgaccccatggggttgttctgtgtttgcatttaagcaagtgacttctgggaagtccccggccgcccggggttctatgatatttgtagtgccggggctcgcacactgctgcccccaacctgtagaggactttcttcagggcccgtagctgctgggcgtacccctggcaggcgggctgtgccgcgggcacatttgccttttgtgaaggccgaactcgagctgtatcctcataggaaacagtgatcaccccggacgggcgtccaggaccctgagggccatggccaaaaggctcctgagtgtgcctggtggtctggctggggctcacggtgggctgtctggggagggtgggtgcctccactatgatccttaaaggattcctctgtgtgggtggatgcgtgtgggcacgactttgtactcagaaattgaactctcagtcacgtggaagccacgggactgctccgaagccgccataataaaatctgattgttcagcccccaaaaaaaaaaaaaaa

SEQ ID NO: 22 - DNA, 993 bp, Homo sapiens
attccacgttcttaactgttccattttccgtatctgcttcgggcttccacctcatttttttcgctttgcccattctgtttcagccagtcgccaagaatcatgaaagtcgccagtggcagcaccgccaccgccgccgcgggccccagctgcgcgctgaaggccggcaagacagcgagcggtgcgggcgaggtggtgcgctgtctgtctgagcagagcgtggccatctcgcgctgcgccgggggcgccggggcgcgcctgcctgccctgctggacgagcagcaggtaaacgtgctgctctacgacatgaacggctgttactcacgcctcaaggagctggtgcccaccctgccccagaaccgcaaggtgagcaaggtggagattctccagcacgtcatcgactacatcagggaccttcagttggagctgaactcggaatccgaagttggaacccccgggggccgagggctgccggtccgggctccgctcagcaccctcaacggcgagatcagcgccctgacggccgaggcggcatgcgttcctgcggacgatcgcatcttgtgtcgctgaagcgcctcccccagggaccggcggaccccagccatccagggggcaagaggaattacgtgctctgtgggtctcccccaacgcgcctcgccggatctgagggagaacaagaccgatcggcggccactgcgcccttaactgcatccagcctggggctgaggctgaggcactggcgaggagagggcgctcctctctgcacacctactagtcaccagagactttagggggtgggattccactcgtgtgtttctattttttgaaaagcagacattttaaaaaatggtcacgtttggtgcttctcagatttctgaggaaattgctttgtattgtatattacaatgatcaccgactgaaaatattgttttacaatagttctgtggggctgtttttttgttattaaacaaataatttagatggtgaaaaaaaaaa

SEQ ID NO: 23 - DNA, 1234 bp, Homo sapiens
attccacgttcttaactgttccattttccgtatctgcttcgggcttccacctcatttttttcgctttgcccattctgtttcagccagtcgccaagaatcatgaaagtcgccagtggcagcaccgccaccgccgccgcgggccccagctgcgcgctgaaggccggcaagacagcgagcggtgcgggcgaggtggtgcgctgtctgtctgagcagagcgtggccatctcgcgctgcgccgggggcgccggggcgcgcctgcctgccctgctggacgagcagcaggtaaacgtgctgctctacgacatgaacggctgttactcacgcctcaaggagctggtgcccaccctgccccagaaccgcaaggtgagcaaggtggagattctccagcacgtcatcgactacatcagggaccttcagttggagctgaactcggaatccgaagttggaacccccgggggccgagggctgccggtccgggctccgctcagcaccctcaacggcgagatcagcgccctgacggccgaggtgagatccagatccgaccactagatcatccttataccgacggggaaacggaggccagagagggcgtgggcgcttgcaccacttccgtcccatccttgcgggtacctggctatgcgggggtgcctaaggagcctggaaaaagcgctcccccgtcgtgcttcctggggaagggggcgttcgctgcgctcggagcggcgtcccttccaacccgccggtctcatttcttctcgttttcacaggcggcatgcgttcctgcggacgatcgcatcttgtgtcgctgaagcgcctcccccagggaccggcggaccccagccatccagggggcaagaggaattacgtgctctgtgggtctcccccaacgcgcctcgccggatctgagggagaacaagaccgatcggcggccactgcgcccttaactgcatccagcctggggctgaggctgaggcactggcgaggagagggcgctcctctctgcacacctactagtcaccagagactttagggggtgggattccactcgtgtgtttctattttttgaaaagcagacattttaaaaaatggtcacgtttggtgcttctcagatttctgaggaaattgctttgtattgtatattacaatgatcaccgactgaaaatattgttttacaatagttctgtggggctgtttttttgttattaaacaaataatttagatggtgaaaaaaaaaaaa

SEQ ID NO: 24 - DNA, 1402 bp, Homo sapiens
ggggacgaagggaagctccagcgtgtggccccggcgagtgcggataaaagccgccccgccgggctcgggcttcattctgagccgagcccggtgccaagcgcagctagctcagcaggcggcagcggcggcctgagcttcagggcagccagctccctcccggtctcgccttccctcgcggtcagcatgaaagccttcagtcccgtgaggtccgttaggaaaaacagcctgtcggaccacagcctgggcatctcccggagcaaaacccctgtggacgacccgatgagcctgctatacaacatgaacgactgctactccaagctcaaggagctggtgcccagcatcccccagaacaagaaggtgagcaagatggaaatcctgcagcacgtcatcgactacatcttggacctgcagatcgccctggactcgcatcccactattgtcagcctgcatcaccagagacccgggcagaaccaggcgtccaggacgccgctgaccaccctcaacacggatatcagcatcctgtccttgcaggcttctgaattcccttctgagttaatgtcaaatgacagcaaagcactgtgtggctgaataagcggtgttcatgatttcttttattctttgcacaacaacaacaacaacaaattcacggaatcttttaagtgctgaacttatttttcaaccatttcacaaggaggacaagttgaatggacctttttaaaaagaaaaaaaaaatggaaggaaaactaagaatgatcatcttcccagggtgttctcttacttggactgtgatattcgttatttatgaaaaagacttttaaatgccctttctgcagttggaaggttttctttatatactattcccaccatggggagcgaaaacgttaaaatcacaaggaattgcccaatctaagcagactttgccttttttcaaaggtggagcgtgaataccagaaggatccagtattcagtcacttaaatgaagtcttttggtcagaaattacctttttgacacaagcctactgaatgctgtgtatatatttatatataaatatatctatttgagtgaaaccttgtgaactctttaattagagttttcttgtatagtggcagagatgtctatttctgcattcaaaagtgtaatgatgtacttattcatgctaaactttttataaaagtttagttgtaaacttaacccttttatacaaaataaatcaagtgtgtttattgaatggtgattgcctgctttatttcagaggaccagtgctttgatttttattatgctatgttataactgaacccaaataaatacaagttcaaatttatgtagactgtataagattataataaaacatgtctgaagtcaaaaaaaaaaaaaaaaaaaaaaaaaaaaaaaaaaaaaaaa

SEQ ID NO: 25 - DNA, 1288 bp, Homo sapiens
gctaaaggcggactggcagggggcagggaagctcaaagatctggggtgctgccaggaaaaagcaaattctggaagttaatggttttgagtgatttttaaatccttgctggcggagaggcccgcctctccccggtatcagcgcttcctcattctttgaatccgcggctccgcggtcttcggcgtcagaccagccggaggaagcctgtttgcaatttaagcgggctgtgaacgcccagggccggcgggggcagggccgaggcgggccattttgaataaagaggcgtgccttccaggcaggctctataagtgaccgccgcggcgagcgtgcgcgcgttgcaggtcactgtagcgggacttcttttggttttctttctctttggggcacctctggactcactccccagcatgaaggcgctgagcccggtgcgcggctgctacgaggcggtgtgctgcctgtcggaacgcagtctggccatcgcccggggccgagggaagggcccggcagctgaggagccgctgagcttgctggacgacatgaaccactgctactcccgcctgcgggaactggtacccggagtcccgagaggcactcagcttagccaggtggaaatcctacagcgcgtcatcgactacattctcgacctgcaggtagtcctggccgagccagcccctggaccccctgatggcccccaccttcccatccagacagccgagctcactccggaacttgtcatctccaacgacaaaaggagcttttgccactgactcggccgtgtcctgacacctccagaacgcaggtgctggcgcccgttctgcctgggaccccgggaacctctcctgccggaagccggacggcagggatgggccccaacttcgccctgcccacttgacttcaccaaatcccttcctggagactaaacctggtgctcaggagcgaaggactgtgaacttgtggcctgaagagccagagctagctctggccaccagctgggcgacgtcaccctgctcccaccccacccccaagttctaaggtctcttcagagcgtggaggtgtggaaggagtggctgctctccaaactatgccaaggcggcggcagagctggtcttctggtctccttggagaaaggttctgttgccctgatttatgaactctataatagagtatataggttttgtaccttttttacaggaaggtgactttctgtaacaatgcgatgtatattaaactttttataaaagttaacattttgcataataaacgatttttaaacacttgtgtatatgatga

SEQ ID NO: 26 - DNA, 2422 bp, Homo sapiens
gtcagcctcccttccaccgccatattgggccactaaaaaaagggggctcgtcttttcggggtgtttttctccccctcccctgtccccgcttgctcacggctctgcgactccgacgccggcaaggtttggagagcggctgggttcgcgggacccgcgggcttgcacccgcccagactcggacgggctttgccaccctctccgcttgcctggtcccctctcctctccgccctcccgctcgccagtccatttgatcagcggagactcggcggccgggccggggcttccccgcagcccctgcgcgctcctagagctcgggccgtggctcgtcggggtctgtgtcttttggctccgagggcagtcgctgggcttccgagaggggttcgggccgcgtaggggcgctttgttttgttcggttttgtttttttgagagtgcgagagaggcggtcgtgcagacccgggagaaagatgtcaaacgtgcgagtgtctaacgggagccctagcctggagcggatggacgccaggcaggcggagcaccccaagccctcggcctgcaggaacctcttcggcccggtggaccacgaagagttaacccgggacttggagaagcactgcagagacatggaagaggcgagccagcgcaagtggaatttcgattttcagaatcacaaacccctagagggcaagtacgagtggcaagaggtggagaagggcagcttgcccgagttctactacagacccccgcggccccccaaaggtgcctgcaaggtgccggcgcaggagagccaggatgtcagcgggagccgcccggcggcgcctttaattggggctccggctaactctgaggacacgcatttggtggacccaaagactgatccgtcggacagccagacggggttagcggagcaatgcgcaggaataaggaagcgacctgcaaccgacgattcttctactcaaaacaaaagagccaacagaacagaagaaaatgtttcagacggttccccaaatgccggttctgtggagcagacgcccaagaagcctggcctcagaagacgtcaaacgtaaacagctcgaattaagaatatgtttccttgtttatcagatacatcactgcttgatgaagcaaggaagatatacatgaaaattttaaaaatacatatcgctgacttcatggaatggacatcctgtataagcactgaaaaacaacaacacaataacactaaaattttaggcactcttaaatgatctgcctctaaaagcgttggatgtagcattatgcaattaggtttttccttatttgcttcattgtactacctgtgtatatagtttttaccttttatgtagcacataaactttggggaagggagggcagggtggggctgaggaactgacgtggagcggggtatgaagagcttgctttgatttacagcaagtagataaatatttgacttgcatgaagagaagcaattttggggaagggtttgaattgttttctttaaagatgtaatgtccctttcagagacagctgatacttcatttaaaaaaatcacaaaaatttgaacactggctaaagataattgctatttatttttacaagaagtttattctcatttgggagatctggtgatctcccaagctatctaaagtttgttagatagctgcatgtggcttttttaaaaaagcaacagaaacctatcctcactgccctccccagtctctcttaaagttggaatttaccagttaattactcagcagaatggtgatcactccaggtagtttggggcaaaaatccgaggtgcttgggagttttgaatgttaagaattgaccatctgcttttattaaatttgttgacaaaattttctcattttcttttcacttcgggctgtgtaaacacagtcaaaataattctaaatccctcgatatttttaaagatctgtaagtaacttcacattaaaaaatgaaatattttttaatttaaagcttactctgtccatttatccacaggaaagtgttatttttaaaggaaggttcatgtagagaaaagcacacttgtaggataagtgaaatggatactacatctttaaacagtatttcattgcctgtgtatggaaaaaccatttgaagtgtacctgtgtacataactctgtaaaaacactgaaaaattatactaacttatttatgttaaaagattttttttaatctagacaatatacaagccaaagtggcatgttttgtgcatttgtaaatgctgtgttgggtagaataggttttcccctcttttgttaaataatatggctatgcttaaaaggttgcatactgagccaagtataattttttgtaatgtgtgaaaaagatgccaattattgttacacattaagtaatcaataaagaaaacttccatagctaaaaaaaaaaaaaaaaaaa

SEQ ID NO: 27 - DNA, 1154 bp, Homo sapiens
cgctcagggaaggcgggtgcgcgcctgcggggcggagatgggcagggggcggtgcgtgggtcccagtctgcagttaagggggcaggagtggcgctgctcacctctggtgccaaagggcggcgcagcggctgccgagctcggccctggaggcggcgagaacatggtgcgcaggttcttggtgaccctccggattcggcgcgcgtgcggcccgccgcgagtgagggttttcgtggttcacatcccgcggctcacgggggagtgggcagcgccaggggcgcccgccgctgtggccctcgtgctgatgctactgaggagccagcgtctagggcagcagccgcttcctagaagaccaggtcatgatgatgggcagcgcccgagtggcggagctgctgctgctccacggcgcggagcccaactgcgccgaccccgccactctcacccgacccgtgcacgacgctgcccgggagggcttcctggacacgctggtggtgctgcaccgggccggggcgcggctggacgtgcgcgatgcctggggccgtctgcccgtggacctggctgaggagctgggccatcgcgatgtcgcacggtacctgcgcgcggctgcggggggcaccagaggcagtaaccatgcccgcatagatgccgcggaaggtccctcagacatccccgattgaaagaaccagagaggctctgagaaacctcgggaaacttagatcatcagtcaccgaaggtcctacagggccacaactgcccccgccacaacccaccccgctttcgtagttttcatttagaaaatagagcttttaaaaatgtcctgccttttaacgtagatatatgccttcccccactaccgtaaatgtccatttatatcattttttatatattcttataaaaatgtaaaaaagaaaaacaccgcttctgccttttcactgtgttggagttttctggagtgagcactcacgccctaagcgcacattcatgtgggcatttcttgcgagcctcgcagcctccggaagctgtcgacttcatgacaagcattttgtgaactagggaagctcaggggggttactggcttctcttgagtcacactgctagcaaatggcagaaccaaagctcaaataaaaataaaataattttcattcattcactcaaaa

SEQ ID NO: 28 - DNA, 1437 bp, Homo sapiens
ctcctccgagcactcgctcacggcgtccccttgcctggaaagataccgcggtccctccagaggatttgagggacagggtcggagggggctcttccgccagcaccggaggaagaaagaggaggggctggctggtcaccagagggtggggcggaccgcgtgcgctcggcggctgcggagagggggagagcaggcagcgggcggcggggagcagcatggagccggcggcggggagcagcatggagccttcggctgactggctggccacggccgcggcccggggtcgggtagaggaggtgcgggcgctgctggaggcgggggcgctgcccaacgcaccgaatagttacggtcggaggccgatccaggtgggtagagggtctgcagcgggagcaggggatggcgggcgactctggaggacgaagtttgcaggggaattggaatcaggtagcgcttcgattctccggaaaaaggggaggcttcctggggagttttcagaaggggtttgtaatcacagacctcctcctggcgacgccctgggggcttgggaagccaaggaagaggaatgaggagccacgcgcgtacagatctctcgaatgctgagaagatctgaaggggggaacatatttgtattagatggaagtcatgatgatgggcagcgcccgagtggcggagctgctgctgctccacggcgcggagcccaactgcgccgaccccgccactctcacccgacccgtgcacgacgctgcccgggagggcttcctggacacgctggtggtgctgcaccgggccggggcgcggctggacgtgcgcgatgcctggggccgtctgcccgtggacctggctgaggagctgggccatcgcgatgtcgcacggtacctgcgcgcggctgcggggggcaccagaggcagtaaccatgcccgcatagatgccgcggaaggtccctcagacatccccgattgaaagaaccagagaggctctgagaaacctcgggaaacttagatcatcagtcaccgaaggtcctacagggccacaactgcccccgccacaacccaccccgctttcgtagttttcatttagaaaatagagcttttaaaaatgtcctgccttttaacgtagatatatgccttcccccactaccgtaaatgtccatttatatcattttttatatattcttataaaaatgtaaaaaagaaaaacaccgcttctgccttttcactgtgttggagttttctggagtgagcactcacgccctaagcgcacattcatgtgggcatttcttgcgagcctcgcagcctccggaagctgtcgacttcatgacaagcattttgtgaactagggaagctcaggggggttactggcttctcttgagtcacactgctagcaaatggcagaaccaaagctcaaataaaaataaaataattttcattcattcactcaaaa

SEQ ID NO: 29 - DNA, 1163 bp, Homo sapiens
ctcctccgagcactcgctcacggcgtccccttgcctggaaagataccgcggtccctccagaggatttgagggacagggtcggagggggctcttccgccagcaccggaggaagaaagaggaggggctggctggtcaccagagggtggggcggaccgcgtgcgctcggcggctgcggagagggggagagcaggcagcgggcggcggggagcagcatggagccggcggcggggagcagcatggagccttcggctgactggctggccacggccgcggcccggggtcgggtagaggaggtgcgggcgctgctggaggcgggggcgctgcccaacgcaccgaatagttacggtcggaggccgatccaggtcatgatgatgggcagcgcccgagtggcggagctgctgctgctccacggcgcggagcccaactgcgccgaccccgccactctcacccgacccgtgcacgacgctgcccgggagggcttcctggacacgctggtggtgctgcaccgggccggggcgcggctggacgtgcgcgatgcctggggccgtctgcccgtggacctggctgaggagctgggccatcgcgatgtcgcacggtacctgcgcgcggctgcggggggcaccagaggcagtaaccatgcccgcatagatgccgcggaaggtccctcagacatccccgattgaaagaaccagagaggctctgagaaacctcgggaaacttagatcatcagtcaccgaaggtcctacagggccacaactgcccccgccacaacccaccccgctttcgtagttttcatttagaaaatagagcttttaaaaatgtcctgccttttaacgtagatatatgccttcccccactaccgtaaatgtccatttatatcattttttatatattcttataaaaatgtaaaaaagaaaaacaccgcttctgccttttcactgtgttggagttttctggagtgagcactcacgccctaagcgcacattcatgtgggcatttcttgcgagcctcgcagcctccggaagctgtcgacttcatgacaagcattttgtgaactagggaagctcaggggggttactggcttctcttgagtcacactgctagcaaatggcagaaccaaagctcaaataaaaataaaataattttcattcattcactcaaaa

SEQ ID NO: 30 - DNA, 2550 bp, Homo sapiens
cgtggatcccgagaaagaggcgcaggacgaggaggcagaacccgactggcgcgtagagcagcagcacgagcagtaggaagcagtcacccggaagcctgggggcgagaggcgaagtggtcaggcgccgaaggccgagagcacgcggggatcggtctcttcccgccgggtctcttaccggtgcgagtcaaagagccgctccggccccggccctgagggaagctccataactgctgcttcaggagcgcccggccgtcgccgccgccgccattttcgcgcccggccgcaggggctcttgggaaggcggagtctttgggcatccgcccggggtgaggggacccgaagtcctgaggcgcgccggaagggctagcggtcccagcataccccgcggccccttgggccgtctcacaactcgcgtccggcggagaccacaattcccggcattcgtggggcagggaggagtcggcctcccggaatcctggtcccggcgtgcacttctgaaggacttcaggtaccggcgtgccccgcgtcctactgtccgcctgctcgcgtcctgggtgccgcctctgagtagggcgggcgaggaggcagccaaggcggagctgatggctgcgccgagggcggggcggggtgcaggctggagccttcgggcatggcgggctttggggggcattcgctgggggaggagaccccgtttgacccctgacctccgggccctgctgacgtcaggaacttctgacccccgggcccgagtgacttatgggacccccagtctctgggcccggttgtctgttggggtcactgaaccccgagcatgcctgacgtctgggaccccgggtccccgggcacaactgactgcggtgaccccagataccaggacccgggaggcctcagagaactctggaacccgttcgcgcgcgtggctggcggtggcgctgggcgctgggggggcagtgctgttgttgttgtggggcgggggtcggggtcctccggccgtcctcgccgccgtccctagcccgccgcccgcttctccccggagtcagtacaacttcatcgcagatgtggtggagaagacagcacctgccgtggtctatatcgagatcctggaccggcaccctttcttgggccgcgaggtccctatctcgaacggctcaggattcgtggtggctgccgatgggctcattgtcaccaacgcccatgtggtggctgatcggcgcagagtccgtgtgagactgctaagcggcgacacgtatgaggccgtggtcacagctgtggatcccgtggcagacatcgcaacgctgaggattcagactaaggagcctctccccacgctgcctctgggacgctcagctgatgtccggcaaggggagtttgttgttgccatgggaagtccctttgcactgcagaacacgatcacatccggcattgttagctctgctcagcgtccagccagagacctgggactcccccaaaccaatgtggaatacattcaaactgatgcagctattgattttggaaactctggaggtcccctggttaacctggatggggaggtgattggagtgaacaccatgaaggtcacagctggaatctcctttgccatcccttctgatcgtcttcgagagtttctgcatcgtggggaaaagaagaattcctcctccggaatcagtgggtcccagcggcgctacattggggtgatgatgctgaccctgagtcccagcatccttgctgaactacagcttcgagaaccaagctttcccgatgttcagcatggtgtactcatccataaagtcatcctgggctcccctgcacaccgggctggtctgcggcctggtgatgtgattttggccattggggagcagatggtacaaaatgctgaagatgtttatgaagctgttcgaacccaatcccagttggcagtgcagatccggcggggacgagaaacactgaccttatatgtgacccctgaggtcacagaatgaatagatcaccaagagtatgaggctcctgctctgatttcctccttgcctttctggctgaggttctgagggcaccgagacagagggttaaatgaaccagtgggggcaggtccctccaaccaccagcactgactcctgggctctgaagaatcacagaaacactttttatataaaataaaattatacctagcaacatattatagtaaaaaatgaggtgggagggctggatcttttcccccaccaaaaggctagaggtaaagctgtatccccctaaacttaggggagatactggagctgaccatcctgacctcctattaaagaaaatgagctgctgccatcttttgtgggcagttagtcaggtgctgctctttgtggtgtggtgggctctggtctgttctgctcggtgctgggcctgggagcaaagattcccatgcttggctacagatactgacagctggcctctgaaggagggtgaaaacttctgcttgacagttccacatccatagtgcatggtctgatgagtgcggttgctgacatgggtttcttggtaagctcctgaggtaatggcagcctc

SEQ ID NO: 31 - DNA, 2259 bp, Homo sapiens
cgtggatcccgagaaagaggcgcaggacgaggaggcagaacccgactggcgcgtagagcagcagcacgagcagtaggaagcagtcacccggaagcctgggggcgagaggcgaagtggtcaggcgccgaaggccgagagcacgcggggatcggtctcttcccgccgggtctcttaccggtgcgagtcaaagagccgctccggccccggccctgagggaagctccataactgctgcttcaggagcgcccggccgtcgccgccgccgccattttcgcgcccggccgcaggggctcttgggaaggcggagtctttgggcatccgcccggggtgaggggacccgaagtcctgaggcgcgccggaagggctagcggtcccagcataccccgcggccccttgggccgtctcacaactcgcgtccggcggagaccacaattcccggcattcgtggggcagggaggagtcggcctcccggaatcctggtcccggcgtgcacttctgaaggacttcaggtaccggcgtgccccgcgtcctactgtccgcctgctcgcgtcctgggtgccgcctctgagtagggcgggcgaggaggcagccaaggcggagctgatggctgcgccgagggcggggcggggtgcaggctggagccttcgggcatggcgggctttggggggcattcgctgggggaggagaccccgtttgacccctgacctccgggccctgctgacgtcaggaacttctgacccccgggcccgagtgacttatgggacccccagtctctgggcccggttgtctgttggggtcactgaaccccgagcatgcctgacgtctgggaccccgggtccccgggcacaactgactgcggtgaccccagataccaggacccgggaggcctcagagaactctggaacccgttcgcgcgcgtggctggcggtggcgctgggcgctgggggggcagtgctgttgttgttgtggggcgggggtcggggtcctccggccgtcctcgccgccgtccctagcccgccgcccgcttctccccggagtcagtacaacttcatcgcagatgtggtggagaagacagcacctgccgtggtctatatcgagatcctggaccggcaccctttcttgggccgcgaggtccctatctcgaacggctcaggattcgtggtggctgccgatgggctcattgtcaccaacgcccatgtggtggctgatcggcgcagagtccgtgtgagactgctaagcggcgacacgtatgaggccgtggtcacagctgtggatcccgtggcagacatcgcaacgctgaggattcagactaagtttggaaactctggaggtcccctggttaacctggatggggaggtgattggagtgaacaccatgaaggtcacagctggaatctcctttgccatcccttctgatcgtcttcgagagtttctgcatcgtggggaaaagaagaattcctcctccggaatcagtgggtcccagcggcgctacattggggtgatgatgctgaccctgagtcccagggctggtctgcggcctggtgatgtgattttggccattggggagcagatggtacaaaatgctgaagatgtttatgaagctgttcgaacccaatcccagttggcagtgcagatccggcggggacgagaaacactgaccttatatgtgacccctgaggtcacagaatgaatagatcaccaagagtatgaggctcctgctctgatttcctccttgcctttctggctgaggttctgagggcaccgagacagagggttaaatgaaccagtgggggcaggtccctccaaccaccagcactgactcctgggctctgaagaatcacagaaacactttttatataaaataaaattatacctagcaacatattatagtaaaaaatgaggtgggagggctggatcttttcccccaccaaaaggctagaggtaaagctgtatccccctaaacttaggggagatactggagctgaccatcctgacctcctattaaagaaaatgagctgctgccatcttttgtgggcagttagtcaggtgctgctctttgtggtgtggtgggctctggtctgttctgctcggtgctgggcctgggagcaaagattcccatgcttggctacagatactgacagctggcctctgaaggagggtgaaaacttctgcttgacagttccacatccatagtgcatggtctgatgagtgcggttgctgacatgggtttcttggtaagctcctgaggtaatggcagcctc

SEQ ID NO: 32 - DNA, 2606 bp, Homo sapiens
ctttccgccctctccccgcctccttttcgggcgtcccgaggccgctccccaaccgacaaccaagaccccgcaggccacgcagccctggagccgaggccccccgacggcggaggcgcccgcgggtcccctacagccaaggtccctgagtgccagaggtggtggtgttgcttatcttctggaaccccatgcagccagatcccaggcctagcggggctggggcctgctgccgattcctgcccctgcagtcacagtgccctgagggggcaggggacgcggtgatgtacgcctccactgagtgcaaggcggaggtgacgccctcccagcatggcaaccgcaccttcagctacaccctggaggatcataccaagcaggcctttggcatcatgaacgagctgcggctcagccagcagctgtgtgacgtcacactgcaggtcaagtaccaggatgcaccggccgcccagttcatggcccacaaggtggtgctggcctcatccagccctgtcttcaaggccatgttcaccaacgggctgcgggagcagggcatggaggtggtgtccattgagggtatccaccccaaggtcatggagcgcctcattgaattcgcctacacggcctccatctccatgggcgagaagtgtgtcctccacgtcatgaacggtgctgtcatgtaccagatcgacagcgttgtccgtgcctgcagtgacttcctggtgcagcagctggaccccagcaatgccatcggcatcgccaacttcgctgagcagattggctgtgtggagttgcaccagcgtgcccgggagtacatctacatgcattttggggaggtggccaagcaagaggagttcttcaacctgtcccactgccaactggtgaccctcatcagccgggacgacctgaacgtgcgctgcgagtccgaggtcttccacgcctgcatcaactgggtcaagtacgactgcgaacagcgacggttctacgtccaggcgctgctgcgggccgtgcgctgccactcgttgacgccgaacttcctgcagatgcagctgcagaagtgcgagatcctgcagtccgactcccgctgcaaggactacctggtcaagatcttcgaggagctcaccctgcacaagcccacgcaggtgatgccctgccgggcgcccaaggtgggccgcctgatctacaccgcgggcggctacttccgacagtcgctcagctacctggaggcttacaaccccagtgacggcacctggctccggttggcggacctgcaggtgccgcggagcggcctggccggctgcgtggtgggcgggctgttgtacgccgtgggcggcaggaacaactcgcccgacggcaacaccgactccagcgccctggactgttacaaccccatgaccaatcagtggtcgccctgcgcccccatgagcgtgccccgtaaccgcatcggggtgggggtcatcgatggccacatctatgccgtcggcggctcccacggctgcatccaccacaacagtgtggagaggtatgagccagagcgggatgagtggcacttggtggccccaatgctgacacgaaggatcggggtgggcgtggctgtcctcaatcgtctcctttatgccgtggggggctttgacgggacaaaccgccttaattcagctgagtgttactacccagagaggaacgagtggcgaatgatcacagcaatgaacaccatccgaagcggggcaggcgtctgcgtcctgcacaactgtatctatgctgctgggggctatgatggtcaggaccagctgaacagcgtggagcgctacgatgtggaaacagagacgtggactttcgtagcccccatgaagcaccggcgaagtgccctggggatcactgtccaccaggggagaatctacgtccttggaggctatgatggtcacacgttcctggacagtgtggagtgttacgacccagatacagacacctggagcgaggtgacccgaatgacatcgggccggagtggggtgggcgtggctgtcaccatggagccctgccggaagcagattgaccagcagaactgtacctgttgaggcacttttgtttcttgggcaaaaatacagtccaatggggagtatcattgtttttgtacaaaaaccgggactaaaagaaaagacagcactgcaaataacccatcttccgggaagggaggccaggatgcctcagtgttaaaatgacatctcaaaagaagtccaaagcgggaatcatgtgcccctcagcggagccccgggagtgtccaagacagcctggctgggaaagggggtgtggaaagagcaggcttccaggagagaggcccccaaaccctctggccgggtaataggcctgggtcccactcacccatgccggcagctgtcaccatgtgatttattcttggatacctgggagggggccaatgggggcctcagggggaggccccctctggaaatgtggttcccagggatgggcctgtacatagaagccaccggatggcacttccccaccggatggacagttattttgttgataagtaaccctgtaattttccaaggaaaataaagaacagactaactagtgtctttcaccctgaaaaaaaaaaaaaa

SEQ ID NO: 33 - DNA, 2577 bp, Homo sapiens
tctgcttagtcatggtgacctgcgcgcgctccgcgcctcccccacgcgcagcgatggaggcgccggggctcgggcggtggaggcggagccggagcgcggccatggcggggtccctgagtgccagaggtggtggtgttgcttatcttctggaaccccatgcagccagatcccaggcctagcggggctggggcctgctgccgattcctgcccctgcagtcacagtgccctgagggggcaggggacgcggtgatgtacgcctccactgagtgcaaggcggaggtgacgccctcccagcatggcaaccgcaccttcagctacaccctggaggatcataccaagcaggcctttggcatcatgaacgagctgcggctcagccagcagctgtgtgacgtcacactgcaggtcaagtaccaggatgcaccggccgcccagttcatggcccacaaggtggtgctggcctcatccagccctgtcttcaaggccatgttcaccaacgggctgcgggagcagggcatggaggtggtgtccattgagggtatccaccccaaggtcatggagcgcctcattgaattcgcctacacggcctccatctccatgggcgagaagtgtgtcctccacgtcatgaacggtgctgtcatgtaccagatcgacagcgttgtccgtgcctgcagtgacttcctggtgcagcagctggaccccagcaatgccatcggcatcgccaacttcgctgagcagattggctgtgtggagttgcaccagcgtgcccgggagtacatctacatgcattttggggaggtggccaagcaagaggagttcttcaacctgtcccactgccaactggtgaccctcatcagccgggacgacctgaacgtgcgctgcgagtccgaggtcttccacgcctgcatcaactgggtcaagtacgactgcgaacagcgacggttctacgtccaggcgctgctgcgggccgtgcgctgccactcgttgacgccgaacttcctgcagatgcagctgcagaagtgcgagatcctgcagtccgactcccgctgcaaggactacctggtcaagatcttcgaggagctcaccctgcacaagcccacgcaggtgatgccctgccgggcgcccaaggtgggccgcctgatctacaccgcgggcggctacttccgacagtcgctcagctacctggaggcttacaaccccagtgacggcacctggctccggttggcggacctgcaggtgccgcggagcggcctggccggctgcgtggtgggcgggctgttgtacgccgtgggcggcaggaacaactcgcccgacggcaacaccgactccagcgccctggactgttacaaccccatgaccaatcagtggtcgccctgcgcccccatgagcgtgccccgtaaccgcatcggggtgggggtcatcgatggccacatctatgccgtcggcggctcccacggctgcatccaccacaacagtgtggagaggtatgagccagagcgggatgagtggcacttggtggccccaatgctgacacgaaggatcggggtgggcgtggctgtcctcaatcgtctcctttatgccgtggggggctttgacgggacaaaccgccttaattcagctgagtgttactacccagagaggaacgagtggcgaatgatcacagcaatgaacaccatccgaagcggggcaggcgtctgcgtcctgcacaactgtatctatgctgctgggggctatgatggtcaggaccagctgaacagcgtggagcgctacgatgtggaaacagagacgtggactttcgtagcccccatgaagcaccggcgaagtgccctggggatcactgtccaccaggggagaatctacgtccttggaggctatgatggtcacacgttcctggacagtgtggagtgttacgacccagatacagacacctggagcgaggtgacccgaatgacatcgggccggagtggggtgggcgtggctgtcaccatggagccctgccggaagcagattgaccagcagaactgtacctgttgaggcacttttgtttcttgggcaaaaatacagtccaatggggagtatcattgtttttgtacaaaaaccgggactaaaagaaaagacagcactgcaaataacccatcttccgggaagggaggccaggatgcctcagtgttaaaatgacatctcaaaagaagtccaaagcgggaatcatgtgcccctcagcggagccccgggagtgtccaagacagcctggctgggaaagggggtgtggaaagagcaggcttccaggagagaggcccccaaaccctctggccgggtaataggcctgggtcccactcacccatgccggcagctgtcaccatgtgatttattcttggatacctgggagggggccaatgggggcctcagggggaggccccctctggaaatgtggttcccagggatgggcctgtacatagaagccaccggatggcacttccccaccggatggacagttattttgttgataagtaaccctgtaattttccaaggaaaataaagaacagactaactagtgtctttcaccctgaaaaaaaaaaaaaa

SEQ ID NO: 34 - DNA, 1752 bp, Homo sapiens
atgaatctcctgccccccaagcccaagtacaatccactccggaatgagtctctgtcatcgatggaggaaggggcttctgggtccacccccccggaggagctgccttccccaccagcttcatccctggggcccatcctgcctcctctgcctggggacgatagtcccactaccctgtgctccttcttcccccggatgagcaacctgaggctggccaacccggctggggggcgcccagggtctaagggggagccaggaagggcagctgatgatggggaggggatcgtaggggcagccatgccagactcaggccccctacccctcctccaggacatgaacaagctgagtggaggcggcgggcgcaggactcgggtggaagggggccagcttgggggcgaggagtggacccgccacgggagctttgtcaataagcccacgcggggctggctgcatcccaacgacaaagtcatgggacccggggtttcctacttggttcggtacatgggttgtgtggaggtcctccagtcaatgcgtgccctggacttcaacacccggactcaggtcaccagggaggccatcagtctggtgtgtgaggctgtgccgggtgctaagggggcgacaaggaggagaaagccctgtagccgcccgctcagctctatcctggggaggagtaacctgaaatttgctggaatgccaatcactctcaccgtctccaccagcagcctcaacctcatggccgcagactgcaaacagatcatcgccaaccaccacatgcaatctatctcatttgcatccggcggggatccggacacagccgagtatgtcgcctatgttgccaaagaccctgtgaatcagagagcctgccacattctggagtgtcccgaagggcttgcccaggatgtcatcagcaccattggccaggccttcgagttgcgcttcaaacaatacctcaggaacccacccaaactggtcacccctcatgacaggatggctggctttgatggctcagcatgggatgaggaggaggaagagccacctgaccatcagtactataatgacttcccggggaaggaaccccccttggggggggtggtagacatgaggcttcgggaaggagccgctccaggggctgctcgacccactgcacccaatgcccagacccccagccacttgggagctacattgcctgtaggacagcctgttgggggagatccagaagtccgcaaacagatgccacctccaccaccctgtccaggcagagagctttttgatgatccctcctatgtcaacgtccagaacctagacaaggcccggcaagcagtgggtggtgctgggccccccaatcctgctatcaatggcagtgcaccccgggacctgtttgacatgaagcccttcgaagatgctcttcgggtgcctccacctccccagtcggtgtccatggctgagcagctccgaggggagccctggttccatgggaagctgagccggcgggaggctgaggcactgctgcagctcaatggggacttcttggtacgggagagcacgaccacacctggccagtatgtgctcactggcttgcagagtgggcagcctaagcatttgctactggtggaccctgagggtgtggttcggactaaggatcaccgctttgaaagtgtcagtcaccttatcagctaccacatggacaatcacttgcccatcatctctgcgggcagcgaactgtgtctacagcaacctgtggagcggaaactgtga

SEQ ID NO: 35 - DNA, 3076 bp, Homo sapiens
gtttctccagggaggcagggcccggggagaaagttggagcggtaacctaagctggcagtggcgtgatccggcaccaaatcggcccgcggtgcggtgcggagactccatgaggccctggacatgaacaagctgagtggaggcggcgggcgcaggactcgggtggaagggggccagcttgggggcgaggagtggacccgccacgggagctttgtcaataagcccacgcggggctggctgcatcccaacgacaaagtcatgggacccggggtttcctacttggttcggtacatgggttgtgtggaggtcctccagtcaatgcgtgccctggacttcaacacccggactcaggtcaccagggaggccatcagtctggtgtgtgaggctgtgccgggtgctaagggggcgacaaggaggagaaagccctgtagccgcccgctcagctctatcctggggaggagtaacctgaaatttgctggaatgccaatcactctcaccgtctccaccagcagcctcaacctcatggccgcagactgcaaacagatcatcgccaaccaccacatgcaatctatctcatttgcatccggcggggatccggacacagccgagtatgtcgcctatgttgccaaagaccctgtgaatcagagagcctgccacattctggagtgtcccgaagggcttgcccaggatgtcatcagcaccattggccaggccttcgagttgcgcttcaaacaatacctcaggaacccacccaaactggtcacccctcatgacaggatggctggctttgatggctcagcatgggatgaggaggaggaagagccacctgaccatcagtactataatgacttcccggggaaggaaccccccttggggggggtggtagacatgaggcttcgggaaggagccgctccaggggctgctcgacccactgcacccaatgcccagacccccagccacttgggagctacattgcctgtaggacagcctgttgggggagatccagaagtccgcaaacagatgccacctccaccaccctgtccagcaggcagagagctttttgatgatccctcctatgtcaacgtccagaacctagacaaggcccggcaagcagtgggtggtgctgggccccccaatcctgctatcaatggcagtgcaccccgggacctgtttgacatgaagcccttcgaagatgctcttcgcgtgcctccacctccccagtcggtgtccatggctgagcagctccgaggggagccctggttccatgggaagctgagccggcgggaggctgaggcactgctgcagctcaatggggacttcctggtacgggagagcacgaccacacctggccagtatgtgctcactggcttgcagagtgggcagcctaagcatttgctactggtggaccctgagggtgtggttcggactaaggatcaccgctttgaaagtgtcagtcaccttatcagctaccacatggacaatcacttgcccatcatctctgcgggcagcgaactgtgtctacagcaacctgtggagcggaaactgtgatctgccctagcgctctcttccagaagatgccctccaatcctttccaccctattccctaactctcgggacctcgtttgggagtgttctgtgggcttggccttgtgtcagagctgggagtagcatggactctgggtttcatatccagctgagtgagagggtttgagtcaaaagcctgggtgagaatcctgcctctccccaaacattaatcaccaaagtattaatgtacagagtggcccctcacctgggcctttcctgtgccaacctgatgccccttccccaagaaggtgagtgcttgtcatggaaaatgtcctgtggtgacaggcccagtggaacagtcacccttctgggcaagggggaacaaatcacacctctgggcttcagggtatcccagacccctctcaacacccgccccccccatgtttaaactttgtgcctttgaccatctcttaggtctaatgatattttatgcaaacagttcttggacccctgaattcaatgacagggatgccaacaccttcttggcttctgggacctgtgttcttgctgagcaccctctccggtttgggttgggataacagaggcaggagtggcagctgtcccctctccctggggatatgcaacccttagagattgccccagagccccactcccggccaggcgggagatggacccctcccttgctcagtgcctcctggccggggcccctcaccccaaggggtctgtatatacatttcataaggcctgccctcccatgttgcatgcctatgtactctacgccaaagtgcagcccttcctcctgaagcctctgccctgcctccctttctgggagggcggggtgggggtgactgaatttgggcctcttgtacagttaactctcccaggtggattttgtggaggtgagaaaaggggcattgagactataaagcagtagacaatccccacataccatctgtagagttggaactgcattcttttaaagttttatatgcatatattttagggctgtagacttactttcctattttcttttccattgcttattcttgagcacaaaatgataatcaattattacatttatacatcacctttttgacttttccaagcccttttacagctcttggcattttcctcgcctaggcctgtgaggtaactgggatcgcaccttttataccagagacctgaggcagatgaaatttatttccatctaggactagaaaaacttgggtctcttaccgcgagactgagaggcagaagtcagcccgaatgcctgtcagtttcatggaggggaaacgcaaaacctgcagttcctgagtaccttctacaggcccggcccagcctaggcccggggtggccacaccacagcaagccggccccccctcttttggccttgtggataagggagagttgaccgttttcatcctggcctccttttgctgtttggatgtttccacgggtctcacttataccaaagggaaaactcttcattaaagtccgtatttcttctaaaaaaaaaaaaaaaaaaaaaaaaaaa

SEQ ID NO: 36 - DNA, 1208 bp, Homo sapiens
ggcggcgacagggagggaggaagcctaggagtccgccgcgggacggaggcctgggggaactgggagttcagctttctgcagagggccactaggaacctcggattgcccacggaagccagccactttctttgacagtccagcccacctcctcttctgcccggagaagctccaggggctgcctttgtgatcacagcatcttcacaaggaccaaaggaaaataagatttcttgtaagaacaccgtgaccacatctttaaaatgacccatttcgtggctcccacaagatttacacctccacactgaggccggaagtggttttgcccctataaaacatggcgaaaagctttcttgtctccaaggaaacgccacgtaatgagtcaaagctgtggcgcacgcgcagaagtacaagctaccggaagtgatggcgcccctactaaagccttggggttagtacgcgtgcgcagcagtttcttccgacagttgtgttgtgccaatggtggagaagaaaacttcggttcgctcccaggaccccgggcagcggcgggtgctggaccgggctgcccggcagcgtcgcatcaaccggcagctggaggccctggagaatgacaacttccaggatgacccccacgcgggactccctcagctcggcaagagactgcctcagtttgatgacgatgcggacactggaaagaaaaagaagaaaacccgaggtgatcattttaaacttcgcttccgaaaaaactttcaggccctgttggaggagcagaacttgagtgtggccgagggccctaactacctgacggcctgtgcgggacccccatcgcggccccagcgccccttctgtgctgtctgtggcttcccatccccctacacctgtgtcagctgcggtgcccggtactgcactgtgcgctgtctggggacccaccaggagaccaggtgtctgaagtggactgtgtgagcctgggcattcccagagaggaagggccgctgtgcactgcccggccttcagaaagacagaatttcatcacccaatgcagggggagctcttcctggaccaagggaggagccgctcattcacccaacaaaactgtgtcttatctgccaggaaagaccagcctcactcctgggaactgtctggcaggtaggctgggccccccagtgctgttagaataaaaagcctcgtgccggaaaaaaaaaaaaaaaaaaaaa

SEQ ID NO: 37 - RNA, 19 nt, Artificial
  Chemically synthesized
gcgccuuuguauuauaaaa

SEQ ID NO: 38 - RNA, 19 nt, Artificial
  Chemically synthesized
caaguaaaagagacacaaa

SEQ ID NO: 39 - RNA, 19 nt, Artificial
  Chemically synthesized
cucuaaacaggaacuugaa

SEQ ID NO: 40 - RNA, 19 nt, Artificial
  Chemically synthesized
ggugcugauaacagcggaa

SEQ ID NO: 41 - RNA, 19 nt, Artificial
  Chemically synthesized
ugccaaagauguuugaaaa

SEQ ID NO: 42 - RNA, 19 nt, Artificial
  Chemically synthesized
cuugaauacugggagagaa

SEQ ID NO: 43 - RNA, 19 nt, Artificial
  Chemically synthesized
guaaaagagacacaaacaa

SEQ ID NO: 44 - RNA, 19 nt, Artificial
  Chemically synthesized
cgugaagaacuccaaaaau

SEQ ID NO: 45 - RNA, 19 nt, Artificial
  Chemically synthesized
gaacuugaauacugggaga

SEQ ID NO: 46 - RNA, 19 nt, Artificial
  Chemically synthesized
ggacauucuggaaaugaca

SEQ ID NO: 47 - RNA, 19 nt, Artificial
  Chemically synthesized
ggagaaaagacgaagagca

SEQ ID NO: 48 - RNA, 19 nt, Artificial
  Chemically synthesized
cagcaucugagcacagaaa

SEQ ID NO: 49 - RNA, 19 nt, Artificial
  Chemically synthesized
agaaagucaucaaagccua

SEQ ID NO: 50 - RNA, 19 nt, Artificial
  Chemically synthesized
agcacagaaagucaucaaa

SEQ ID NO: 51 - RNA, 19 nt, Artificial
  Chemically synthesized
cuucccuccggacucuaaa

SEQ ID NO: 52 - RNA, 19 nt, Artificial
  Chemically synthesized
gagagaagaggacuuuuuu

SEQ ID NO: 53 - RNA, 19 nt, Artificial
  Chemically synthesized
ucaccaaguagccacaaaa

SEQ ID NO: 54 - RNA, 19 nt, Artificial
  Chemically synthesized
gccuauuauggagaaaaga

SEQ ID NO: 55 - RNA, 19 nt, Artificial
  Chemically synthesized
ggcauuccaagcuggagaa

SEQ ID NO: 56 - RNA, 19 nt, Artificial
  Chemically synthesized
ugaaaacacugauuuugga

SEQ ID NO: 57 - RNA, 19 nt, Artificial
  Chemically synthesized
ucgugaagaacuccaaaaa

SEQ ID NO: 58 - RNA, 19 nt, Artificial
  Chemically synthesized
cuuuuuuaugugaugccaa

SEQ ID NO: 59 - RNA, 19 nt, Artificial
  Chemically synthesized
guuacuuuuuguagagaga

SEQ ID NO: 60 - RNA, 19 nt, Artificial
  Chemically synthesized
agucugagccagcugaaaa

SEQ ID NO: 61 - RNA, 19 nt, Artificial
  Chemically synthesized
ccagcugauauaauggaga

SEQ ID NO: 62 - RNA, 19 nt, Artificial
  Chemically synthesized
gggagagaagaggacuuuu

SEQ ID NO: 63 - RNA, 19 nt, Artificial
  Chemically synthesized
acugcaugacccagaucaa

SEQ ID NO: 64 - RNA, 19 nt, Artificial
  Chemically synthesized
gcugauauaauggagaaaa

SEQ ID NO: 65 - RNA, 19 nt, Artificial
  Chemically synthesized
uugcuuuccucauucccaa

SEQ ID NO: 66 - RNA, 19 nt, Artificial
  Chemically synthesized
ugauuuuggaugcucugaa

SEQ ID NO: 67 - RNA, 19 nt, Artificial
  Chemically synthesized
ucaaguaaaagagacacaa

SEQ ID NO: 68 - RNA, 19 nt, Artificial
  Chemically synthesized
ggaugcucugaagaaagau

SEQ ID NO: 69 - RNA, 19 nt, Artificial
  Chemically synthesized
cuggaacagcgcuacugau

SEQ ID NO: 70 - RNA, 19 nt, Artificial
  Chemically synthesized
ggauaaaccaaagacagca

SEQ ID NO: 71 - RNA, 19 nt, Artificial
  Chemically synthesized
ggagcuggugcugauaaca

SEQ ID NO: 72 - RNA, 19 nt, Artificial
  Chemically synthesized
ugcucaguaguuuugugaa

SEQ ID NO: 73 - RNA, 19 nt, Artificial
  Chemically synthesized
agaagaggacuuuuuugau

SEQ ID NO: 74 - RNA, 19 nt, Artificial
  Chemically synthesized
ggagagaagaggacuuuuu

SEQ ID NO: 75 - RNA, 19 nt, Artificial
  Chemically synthesized
uuuggaugcucugaagaaa

SEQ ID NO: 76 - RNA, 19 nt, Artificial
  Chemically synthesized
aguaaaagagacacaaaca

SEQ ID NO: 77 - RNA, 19 nt, Artificial
  Chemically synthesized
ugcgccuuuguauuauaaa

SEQ ID NO: 78 - RNA, 19 nt, Artificial
  Chemically synthesized
gccaguuugcuuuccucau

SEQ ID NO: 79 - RNA, 19 nt, Artificial
  Chemically synthesized
uucuggaaaugacagugaa

SEQ ID NO: 80 - RNA, 19 nt, Artificial
  Chemically synthesized
cacugauuuuggaugcucu

SEQ ID NO: 81 - RNA, 19 nt, Artificial
  Chemically synthesized
guauuaagugacugaccau

SEQ ID NO: 82 - RNA, 19 nt, Artificial
  Chemically synthesized
gauuuuggaugcucugaag

SEQ ID NO: 83 - RNA, 19 nt, Artificial
  Chemically synthesized
gcaucugagcacagaaagu

SEQ ID NO: 84 - RNA, 19 nt, Artificial
  Chemically synthesized
acagcaucugagcacagaa

SEQ ID NO: 85 - RNA, 19 nt, Artificial
  Chemically synthesized
agcugauauaauggagaaa

SEQ ID NO: 86 - RNA, 19 nt, Artificial
  Chemically synthesized
gugaagaacuccaaaaaua

SEQ ID NO: 87 - RNA, 19 nt, Artificial
  Chemically synthesized
uuucgugaagaacuccaaa

SEQ ID NO: 88 - RNA, 19 nt, Artificial
  Chemically synthesized
agaucaaugccaugaccua

SEQ ID NO: 89 - RNA, 19 nt, Artificial
  Chemically synthesized
auagcucgcggcauuccaa

SEQ ID NO: 90 - RNA, 19 nt, Artificial
  Chemically synthesized
cgcuacugaucaccaagua

SEQ ID NO: 91 - RNA, 19 nt, Artificial
  Chemically synthesized
gaaagucugagccagcuga

SEQ ID NO: 92 - RNA, 19 nt, Artificial
  Chemically synthesized
accaaguagccacaaaaua

SEQ ID NO: 93 - RNA, 19 nt, Artificial
  Chemically synthesized
uggaaaugacagugaagca

SEQ ID NO: 94 - RNA, 19 nt, Artificial
  Chemically synthesized
aaagucugagccagcugaa

SEQ ID NO: 95 - RNA, 19 nt, Artificial
  Chemically synthesized
aaaagacgaagagcaagaa

SEQ ID NO: 96 - RNA, 19 nt, Artificial
  Chemically synthesized
gagaagaggacuuuuuuga

SEQ ID NO: 97 - RNA, 19 nt, Artificial
  Chemically synthesized
uggugcugauaacagcgga

SEQ ID NO: 98 - RNA, 19 nt, Artificial
  Chemically synthesized
ccaugcacuauauuuguau

SEQ ID NO: 99 - RNA, 19 nt, Artificial
  Chemically synthesized
agcugaaaacacugauuuu

SEQ ID NO: 100 - RNA, 19 nt, Artificial
  Chemically synthesized
ugaugccaaagauguuuga

SEQ ID NO: 101 - RNA, 19 nt, Artificial
  Chemically synthesized
uuuuguagagagagcugua

SEQ ID NO: 102 - RNA, 19 nt, Artificial
  Chemically synthesized
gaaagauagcucgcggcau

SEQ ID NO: 103 - RNA, 19 nt, Artificial
  Chemically synthesized
agcuguauuaagugacuga

SEQ ID NO: 104 - RNA, 19 nt, Artificial
  Chemically synthesized
cggacauucuggaaaugac

SEQ ID NO: 105 - RNA, 19 nt, Artificial
  Chemically synthesized
aagucaucaaagccuauua

SEQ ID NO: 106 - RNA, 19 nt, Artificial
  Chemically synthesized
aguuuugugaaagucucaa

SEQ ID NO: 107 - RNA, 19 nt, Artificial
  Chemically synthesized
augccaaagauguuugaaa

SEQ ID NO: 108 - RNA, 19 nt, Artificial
  Chemically synthesized
uguauuaagugacugacca

SEQ ID NO: 109 - RNA, 19 nt, Artificial
  Chemically synthesized
gaagaggacuuuuuugauu

SEQ ID NO: 110 - RNA, 19 nt, Artificial
  Chemically synthesized
uccggacucuaaacaggaa

SEQ ID NO: 111 - RNA, 19 nt, Artificial
  Chemically synthesized
caccaaguagccacaaaau

SEQ ID NO: 112 - RNA, 19 nt, Artificial
  Chemically synthesized
cugcaugacccagaucaau

SEQ ID NO: 113 - RNA, 19 nt, Artificial
  Chemically synthesized
uauggagaaaagacgaaga

SEQ ID NO: 114 - RNA, 19 nt, Artificial
  Chemically synthesized
uauuauggagaaaagacga

SEQ ID NO: 115 - RNA, 19 nt, Artificial
  Chemically synthesized
auuggauugcgccuuugua

SEQ ID NO: 116 - RNA, 19 nt, Artificial
  Chemically synthesized
ggacuuuuuugauuaagug

SEQ ID NO: 117 - RNA, 19 nt, Artificial
  Chemically synthesized
ucuucccuccggacucuaa

SEQ ID NO: 118 - RNA, 19 nt, Artificial
  Chemically synthesized
agccuauuauggagaaaag

SEQ ID NO: 119 - RNA, 19 nt, Artificial
  Chemically synthesized
agagcuguauuaagugacu

SEQ ID NO: 120 - RNA, 19 nt, Artificial
  Chemically synthesized
uuuuggaugcucugaagaa

SEQ ID NO: 121 - RNA, 19 nt, Artificial
  Chemically synthesized
aagucugagccagcugaaa

SEQ ID NO: 122 - RNA, 19 nt, Artificial
  Chemically synthesized
acgacaccggauaaaccaa

SEQ ID NO: 123 - RNA, 19 nt, Artificial
  Chemically synthesized
aaaugccagcugauauaau

SEQ ID NO: 124 - RNA, 19 nt, Artificial
  Chemically synthesized
auugcgccuuuguauuaua

SEQ ID NO: 125 - RNA, 19 nt, Artificial
  Chemically synthesized
ugaauacugggagagaaga

SEQ ID NO: 126 - RNA, 19 nt, Artificial
  Chemically synthesized
acuugaauacugggagaga

SEQ ID NO: 127 - RNA, 19 nt, Artificial
  Chemically synthesized
aaagccuauuauggagaaa

SEQ ID NO: 128 - RNA, 19 nt, Artificial
  Chemically synthesized
uaguuuugugaaagucuca

SEQ ID NO: 129 - RNA, 19 nt, Artificial
  Chemically synthesized
gauguuugaaaaugcucuu

SEQ ID NO: 130 - RNA, 19 nt, Artificial
  Chemically synthesized
gugguuacuuuguguuuuu

SEQ ID NO: 131 - RNA, 19 nt, Artificial
  Chemically synthesized
cugggagagaagaggacuu

SEQ ID NO: 132 - RNA, 19 nt, Artificial
  Chemically synthesized
acgugcgagggcguuaaua

SEQ ID NO: 133 - RNA, 19 nt, Artificial
  Chemically synthesized
agucaucaaagccuauuau

SEQ ID NO: 134 - RNA, 19 nt, Artificial
  Chemically synthesized
aaggcggacauucuggaaa

SEQ ID NO: 135 - RNA, 19 nt, Artificial
  Chemically synthesized
aagccuauuauggagaaaa

SEQ ID NO: 136 - RNA, 19 nt, Artificial
  Chemically synthesized
cucagaugacauuucguuu

SEQ ID NO: 137 - RNA, 19 nt, Artificial
  Chemically synthesized
gccaaagauguuugaaaau

SEQ ID NO: 138 - RNA, 19 nt, Artificial
  Chemically Synthesized
ccucagcacuugcucagua

SEQ ID NO: 139 - RNA, 19 nt, Artificial
  Chemically Synthesized
uagagagagcuguauuaag

SEQ ID NO: 140 - RNA, 19 nt, Artificial
  Chemically Synthesized
ucuaaacaggaacuugaau

SEQ ID NO: 141 - RNA, 19 nt, Artificial
  Chemically Synthesized
cggacucuaaacaggaacu

SEQ ID NO: 142 - RNA, 19 nt, Artificial
  Chemically Synthesized
ucuccuugguccuggaaca

SEQ ID NO: 143 - RNA, 19 nt, Artificial
  Chemically Synthesized
caaagauguuugaaaaugc

SEQ ID NO: 144 - RNA, 19 nt, Artificial
  Chemically Synthesized
uuucguuuuuuacacgaga

SEQ ID NO: 145 - RNA, 19 nt, Artificial
  Chemically Synthesized
agugacugaccaugcacua

SEQ ID NO: 146 - RNA, 19 nt, Artificial
  Chemically Synthesized
ggaacuugaauacugggag

SEQ ID NO: 147 - RNA, 19 nt, Artificial
  Chemically Synthesized
gcuucagcgagugcaugaa

SEQ ID NO: 148 - RNA, 19 nt, Artificial
  Chemically Synthesized
gcggacauucuggaaauga

SEQ ID NO: 149 - RNA, 19 nt, Artificial
  Chemically Synthesized
gaaaacacugauuuuggau

SEQ ID NO: 150 - RNA, 19 nt, Artificial
  Chemically Synthesized
aaagacgaagagcaagaau

SEQ ID NO: 151 - RNA, 19 nt, Artificial
  Chemically Synthesized
cagaugacauuucguuuuu

SEQ ID NO: 152 - RNA, 19 nt, Artificial
  Chemically Synthesized
agcucagaugacauuucgu

SEQ ID NO: 153 - RNA, 19 nt, Artificial
  Chemically Synthesized
gaauacugggagagaagag

SEQ ID NO: 154 - RNA, 19 nt, Artificial
  Chemically Synthesized
acaggaacuugaauacugg

SEQ ID NO: 155 - RNA, 19 nt, Artificial
  Chemically Synthesized
ggccaguuugcuuuccuca

SEQ ID NO: 156 - RNA, 19 nt, Artificial
  Chemically Synthesized
ugaucaccaaguagccaca

SEQ ID NO: 157 - RNA, 19 nt, Artificial
  Chemically Synthesized
aagacagcaucugagcaca

SEQ ID NO: 158 - RNA, 19 nt, Artificial
  Chemically Synthesized
accggauaaaccaaagaca

SEQ ID NO: 159 - RNA, 19 nt, Artificial
  Chemically Synthesized
gccagcugauauaauggag

SEQ ID NO: 160 - RNA, 19 nt, Artificial
  Chemically Synthesized
aaaaugccagcugauauaa

SEQ ID NO: 161 - RNA, 19 nt, Artificial
  Chemically Synthesized
aagucucaaguaaaagaga

SEQ ID NO: 162 - RNA, 19 nt, Artificial
  Chemically Synthesized
aacgcagugucaccuucca

SEQ ID NO: 163 - RNA, 19 nt, Artificial
  Chemically Synthesized
gacccagaucaaugccaug

SEQ ID NO: 164 - RNA, 19 nt, Artificial
  Chemically Synthesized
gagugcaugaacgagguga

SEQ ID NO: 165 - RNA, 19 nt, Artificial
  Chemically Synthesized
agaaggcggacauucugga

SEQ ID NO: 166 - RNA, 19 nt, Artificial
  Chemically Synthesized
agaaagauagcucgcggca

SEQ ID NO: 167 - RNA, 19 nt, Artificial
  Chemically Synthesized
gacagcaucugagcacaga

SEQ ID NO: 168 - RNA, 19 nt, Artificial
  Chemically Synthesized
ccggauaaaccaaagacag

SEQ ID NO: 169 - RNA, 19 nt, Artificial
  Chemically Synthesized
cacgacaccggauaaacca

SEQ ID NO: 170 - RNA, 19 nt, Artificial
  Chemically Synthesized
gcacuugcucaguaguuuu

SEQ ID NO: 171 - RNA, 19 nt, Artificial
  Chemically Synthesized
agauguuugaaaaugcucu

SEQ ID NO: 172 - RNA, 19 nt, Artificial
  Chemically Synthesized
auaaaagcucagaugacau

SEQ ID NO: 173 - RNA, 19 nt, Artificial
  Chemically Synthesized
gaaguuacuuuuuguagag

SEQ ID NO: 174 - RNA, 19 nt, Artificial
  Chemically Synthesized
cuccggacucuaaacagga

SEQ ID NO: 175 - RNA, 19 nt, Artificial
  Chemically Synthesized
gcgcuacugaucaccaagu

SEQ ID NO: 176 - RNA, 19 nt, Artificial
  Chemically Synthesized
ccagcugaaaacacugauu

SEQ ID NO: 177 - RNA, 19 nt, Artificial
  Chemically Synthesized
auuauggagaaaagacgaa

SEQ ID NO: 178 - RNA, 19 nt, Artificial
  Chemically Synthesized
caaagacagcaucugagca

SEQ ID NO: 179 - RNA, 19 nt, Artificial
  Chemically Synthesized
gucucaaguaaaagagaca

SEQ ID NO: 180 - RNA, 19 nt, Artificial
  Chemically Synthesized
ucaguaguuuugugaaagu

SEQ ID NO: 181 - RNA, 19 nt, Artificial
  Chemically Synthesized
gugacugaccaugcacuau

SEQ ID NO: 182 - RNA, 19 nt, Artificial
  Chemically Synthesized
ugacccagaucaaugccau

SEQ ID NO: 183 - RNA, 19 nt, Artificial
  Chemically Synthesized
gaagaaagauagcucgcgg

SEQ ID NO: 184 - RNA, 19 nt, Artificial
  Chemically Synthesized
acaccggauaaaccaaaga

SEQ ID NO: 185 - RNA, 19 nt, Artificial
  Chemically Synthesized
uuuucgugaagaacuccaa

SEQ ID NO: 186 - RNA, 19 nt, Artificial
  Chemically Synthesized
aaguaaaagagacacaaac

SEQ ID NO: 187 - RNA, 19 nt, Artificial
  Chemically Synthesized
cgccuuuguauuauaaaag

SEQ ID NO: 188 - RNA, 19 nt, Artificial
  Chemically Synthesized
auauaauaaacccucagca

SEQ ID NO: 189 - RNA, 19 nt, Artificial
  Chemically Synthesized
auacugggagagaagagga

SEQ ID NO: 190 - RNA, 19 nt, Artificial
  Chemically Synthesized
ggcggacauucuggaaaug

SEQ ID NO: 191 - RNA, 19 nt, Artificial
  Chemically Synthesized
uggagaaggcggacauucu

SEQ ID NO: 192 - RNA, 19 nt, Artificial
  Chemically Synthesized
aguaguuuugugaaagucu

SEQ ID NO: 193 - RNA, 19 nt, Artificial
  Chemically Synthesized
gaugccaaagauguuugaa

SEQ ID NO: 194 - RNA, 19 nt, Artificial
  Chemically Synthesized
augugaugccaaagauguu

SEQ ID NO: 195 - RNA, 19 nt, Artificial
  Chemically Synthesized
uuggauugcgccuuuguau

SEQ ID NO: 196 - RNA, 19 nt, Artificial
  Chemically Synthesized
ucagcgagugcaugaacga

SEQ ID NO: 197 - RNA, 19 nt, Artificial
  Chemically Synthesized
ccuauuauggagaaaagac

SEQ ID NO: 198 - RNA, 19 nt, Artificial
  Chemically Synthesized
agccagugucaacacgaca

SEQ ID NO: 199 - RNA, 19 nt, Artificial
  Chemically Synthesized
guaguuuugugaaagucuc

SEQ ID NO: 200 - RNA, 19 nt, Artificial
  Chemically Synthesized
cuaagguguuuggaggcuu

SEQ ID NO: 201 - RNA, 19 nt, Artificial
  Chemically Synthesized
agugcaugaacgaggugac

SEQ ID NO: 202 - RNA, 19 nt, Artificial
  Chemically Synthesized
aaaugacagugaagcaccu

SEQ ID NO: 203 - RNA, 19 nt, Artificial
  Chemically Synthesized
agaaaagacgaagagcaag

SEQ ID NO: 204 - RNA, 19 nt, Artificial
  Chemically Synthesized
uucgugaagaacuccaaaa

SEQ ID NO: 205 - RNA, 19 nt, Artificial
  Chemically Synthesized
ucuuuuuuaugugaugcca

SEQ ID NO: 206 - RNA, 19 nt, Artificial
  Chemically Synthesized
cugaccaugcacuauauuu

SEQ ID NO: 207 - RNA, 19 nt, Artificial
  Chemically Synthesized
agugguuacuuuguguuuu

SEQ ID NO: 208 - RNA, 19 nt, Artificial
  Chemically Synthesized
agagaagaggacuuuuuug

SEQ ID NO: 209 - RNA, 19 nt, Artificial
  Chemically Synthesized
agguguuuggaggcuucca

SEQ ID NO: 210 - RNA, 19 nt, Artificial
  Chemically Synthesized
ugagccagcugaaaacacu

SEQ ID NO: 211 - RNA, 19 nt, Artificial
  Chemically Synthesized
cagaaagucaucaaagccu

SEQ ID NO: 212 - RNA, 19 nt, Artificial
  Chemically Synthesized
gcucuuaaaauaucuuccu

SEQ ID NO: 213 - RNA, 19 nt, Artificial
  Chemically Synthesized
guuaauaccgaggugcgca

SEQ ID NO: 214 - RNA, 19 nt, Artificial
  Chemically Synthesized
cugauuuuggaugcucuga

SEQ ID NO: 215 - RNA, 19 nt, Artificial
  Chemically Synthesized
gucugagccagcugaaaac

SEQ ID NO: 216 - RNA, 19 nt, Artificial
  Chemically Synthesized
ugccagcugauauaaugga

SEQ ID NO: 217 - RNA, 19 nt, Artificial
  Chemically Synthesized
aagugguuacuuuguguuu

SEQ ID NO: 218 - RNA, 19 nt, Artificial
  Chemically Synthesized
caggaacuugaauacuggg

SEQ ID NO: 219 - RNA, 19 nt, Artificial
  Chemically Synthesized
ggacucuaaacaggaacuu

SEQ ID NO: 220 - RNA, 19 nt, Artificial
  Chemically Synthesized
aucaccaaguagccacaaa

SEQ ID NO: 221 - RNA, 19 nt, Artificial
  Chemically Synthesized
gaucaccaaguagccacaa

SEQ ID NO: 222 - RNA, 19 nt, Artificial
  Chemically Synthesized
aaaugaaagucugagccag

SEQ ID NO: 223 - RNA, 19 nt, Artificial
  Chemically Synthesized
gaauaaaugaaagucugag

SEQ ID NO: 224 - RNA, 19 nt, Artificial
  Chemically Synthesized
cuauuauggagaaaagacg

SEQ ID NO: 225 - RNA, 19 nt, Artificial
  Chemically Synthesized
aucugagcacagaaaguca

SEQ ID NO: 226 - RNA, 19 nt, Artificial
  Chemically Synthesized
guuuugugaaagucucaag

SEQ ID NO: 227 - RNA, 19 nt, Artificial
  Chemically Synthesized
cauuucguuuuuuacacga

SEQ ID NO: 228 - RNA, 19 nt, Artificial
  Chemically Synthesized
aggaacuugaauacuggga

SEQ ID NO: 229 - RNA, 19 nt, Artificial
  Chemically Synthesized
ccggacucuaaacaggaac

SEQ ID NO: 230 - RNA, 19 nt, Artificial
  Chemically Synthesized
uuugcuuuccucauuccca

SEQ ID NO: 231 - RNA, 19 nt, Artificial
  Chemically Synthesized
ggaaaugacagugaagcac

SEQ ID NO: 232 - RNA, 19 nt, Artificial
  Chemically Synthesized
gacauuucguuuuuuacac

SEQ ID NO: 233 - RNA, 19 nt, Artificial
  Chemically Synthesized
auuuuggaugcucugaaga

SEQ ID NO: 234 - RNA, 19 nt, Artificial
  Chemically Synthesized
uaaaugaaagucugagcca

SEQ ID NO: 235 - RNA, 19 nt, Artificial
  Chemically Synthesized
ugucaacacgacaccggau

SEQ ID NO: 236 - RNA, 19 nt, Artificial
  Chemically Synthesized
cuugcucaguaguuuugug

SEQ ID NO: 237 - RNA, 19 nt, Artificial
  Chemically Synthesized
uuuuaugugaugccaaaga

SEQ ID NO: 238 - RNA, 19 nt, Artificial
  Chemically Synthesized
cguuuuuuacacgagauuu

SEQ ID NO: 239 - RNA, 19 nt, Artificial
  Chemically Synthesized
uguucauauuggauugcgc

SEQ ID NO: 240 - RNA, 19 nt, Artificial
  Chemically Synthesized
acugaccaugcacuauauu

SEQ ID NO: 241 - RNA, 19 nt, Artificial
  Chemically Synthesized
uugaauacugggagagaag

SEQ ID NO: 242 - RNA, 19 nt, Artificial
  Chemically Synthesized
cucaaguaaaagagacaca

SEQ ID NO: 243 - RNA, 19 nt, Artificial
  Chemically Synthesized
uuguagagagagcuguauu

SEQ ID NO: 244 - RNA, 19 nt, Artificial
  Chemically Synthesized
aguuacuuuuuguagagag

SEQ ID NO: 245 - RNA, 19 nt, Artificial
  Chemically Synthesized
ugauuaagugguuacuuug

SEQ ID NO: 246 - RNA, 19 nt, Artificial
  Chemically Synthesized
gaggacuuuuuugauuaag

SEQ ID NO: 247 - RNA, 19 nt, Artificial
  Chemically Synthesized
gccagcugaaaacacugau

SEQ ID NO: 248 - RNA, 19 nt, Artificial
  Chemically Synthesized
ucagcacuugcucaguagu

SEQ ID NO: 249 - RNA, 19 nt, Artificial
  Chemically Synthesized
gauuaagugguuacuuugu

SEQ ID NO: 250 - RNA, 19 nt, Artificial
  Chemically Synthesized
uaagguguuuggaggcuuc

SEQ ID NO: 251 - RNA, 19 nt, Artificial
  Chemically Synthesized
gcuacugaucaccaaguag

SEQ ID NO: 252 - RNA, 19 nt, Artificial
  Chemically Synthesized
acugauuuuggaugcucug

SEQ ID NO: 253 - RNA, 19 nt, Artificial
  Chemically Synthesized
cugaaaacacugauuuugg

SEQ ID NO: 254 - RNA, 19 nt, Artificial
  Chemically Synthesized
gugcugauaacagcggaau

SEQ ID NO: 255 - RNA, 19 nt, Artificial
  Chemically Synthesized
uuaugugaugccaaagaug

SEQ ID NO: 256 - RNA, 19 nt, Artificial
  Chemically Synthesized
uggauugcgccuuuguauu

SEQ ID NO: 257 - RNA, 19 nt, Artificial
  Chemically Synthesized
gcuguauuaagugacugac

SEQ ID NO: 258 - RNA, 19 nt, Artificial
  Chemically Synthesized
acugggagagaagaggacu

SEQ ID NO: 259 - RNA, 19 nt, Artificial
  Chemically Synthesized
agcuggugcugauaacagc

SEQ ID NO: 260 - RNA, 19 nt, Artificial
  Chemically Synthesized
ucaaagccuauuauggaga

SEQ ID NO: 261 - RNA, 19 nt, Artificial
  Chemically Synthesized
cggauaaaccaaagacagc

SEQ ID NO: 262 - RNA, 19 nt, Artificial
  Chemically Synthesized
ucuuuuucgugaagaacuc

SEQ ID NO: 263 - RNA, 19 nt, Artificial
  Chemically Synthesized
ugaaagucucaaguaaaag

SEQ ID NO: 264 - RNA, 19 nt, Artificial
  Chemically Synthesized
uuuugugaaagucucaagu

SEQ ID NO: 265 - RNA, 19 nt, Artificial
  Chemically Synthesized
cucaguaguuuugugaaag

SEQ ID NO: 266 - RNA, 19 nt, Artificial
  Chemically Synthesized
gacucuaaacaggaacuug

SEQ ID NO: 267 - RNA, 19 nt, Artificial
  Chemically Synthesized
uuggaugcucugaagaaag

SEQ ID NO: 268 - RNA, 19 nt, Artificial
  Chemically Synthesized
uauuggauugcgccuuugu

SEQ ID NO: 269 - RNA, 19 nt, Artificial
  Chemically Synthesized
gagagcuguauuaagugac

SEQ ID NO: 270 - RNA, 19 nt, Artificial
  Chemically Synthesized
ucuggaaaugacagugaag

SEQ ID NO: 271 - RNA, 19 nt, Artificial
  Chemically Synthesized
agcaucugagcacagaaag

SEQ ID NO: 272 - RNA, 19 nt, Artificial
  Chemically Synthesized
ccaaagauguuugaaaaug

SEQ ID NO: 273 - RNA, 19 nt, Artificial
  Chemically Synthesized
ucagaugacauuucguuuu

SEQ ID NO: 274 - RNA, 19 nt, Artificial
  Chemically Synthesized
acagcgcuacugaucacca

SEQ ID NO: 275 - RNA, 19 nt, Artificial
  Chemically Synthesized
ucugagcacagaaagucau

SEQ ID NO: 276 - RNA, 19 nt, Artificial
  Chemically Synthesized
agcacuugcucaguaguuu

SEQ ID NO: 277 - RNA, 19 nt, Artificial
  Chemically Synthesized
cagcacuugcucaguaguu

SEQ ID NO: 278 - RNA, 19 nt, Artificial
  Chemically Synthesized
auaauaaacccucagcacu

SEQ ID NO: 279 - RNA, 19 nt, Artificial
  Chemically Synthesized
uguuuggaggcuuccaggu

SEQ ID NO: 280 - RNA, 19 nt, Artificial
  Chemically Synthesized
cagcugaaaacacugauuu

SEQ ID NO: 281 - RNA, 19 nt, Artificial
  Chemically Synthesized
ucaucaaagccuauuaugg

SEQ ID NO: 282 - RNA, 19 nt, Artificial
  Chemically Synthesized
acuugcucaguaguuuugu

SEQ ID NO: 283 - RNA, 19 nt, Artificial
  Chemically Synthesized
cuguauuaagugacugacc

SEQ ID NO: 284 - RNA, 19 nt, Artificial
  Chemically Synthesized
uuuguagagagagcuguau

SEQ ID NO: 285 - RNA, 19 nt, Artificial
  Chemically Synthesized
cuuuuuguagagagagcug

SEQ ID NO: 286 - RNA, 19 nt, Artificial
  Chemically Synthesized
uacugggagagaagaggac

SEQ ID NO: 287 - RNA, 19 nt, Artificial
  Chemically Synthesized
ccagaucaaugccaugacc

SEQ ID NO: 288 - RNA, 19 nt, Artificial
  Chemically Synthesized
gcaugacccagaucaaugc

SEQ ID NO: 289 - RNA, 19 nt, Artificial
  Chemically Synthesized
cucugaagaaagauagcuc

SEQ ID NO: 290 - RNA, 19 nt, Artificial
  Chemically Synthesized
gcugaaaacacugauuuug

SEQ ID NO: 291 - RNA, 19 nt, Artificial
  Chemically Synthesized
caccggauaaaccaaagac

SEQ ID NO: 292 - RNA, 19 nt, Artificial
  Chemically Synthesized
caguaguuuugugaaaguc

SEQ ID NO: 293 - RNA, 19 nt, Artificial
  Chemically Synthesized
guuuuuuacacgagauuuc

SEQ ID NO: 294 - RNA, 19 nt, Artificial
  Chemically Synthesized
aacccucagcacuugcuca

SEQ ID NO: 295 - RNA, 19 nt, Artificial
  Chemically Synthesized
aaaagcucagaugacauuu

SEQ ID NO: 296 - RNA, 19 nt, Artificial
  Chemically Synthesized
uuauaaaagcucagaugac

SEQ ID NO: 297 - RNA, 19 nt, Artificial
  Chemically Synthesized
ugcuuuccucauucccaac

SEQ ID NO: 298 - RNA, 19 nt, Artificial
  Chemically Synthesized
cgauggccaguuugcuuuc

SEQ ID NO: 299 - RNA, 19 nt, Artificial
  Chemically Synthesized
cccagaucaaugccaugac

SEQ ID NO: 300 - RNA, 19 nt, Artificial
  Chemically Synthesized
gcucugaagaaagauagcu

SEQ ID NO: 301 - RNA, 19 nt, Artificial
  Chemically Synthesized
agcgcuacugaucaccaag

SEQ ID NO: 302 - RNA, 19 nt, Artificial
  Chemically Synthesized
augaaagucugagccagcu

SEQ ID NO: 303 - RNA, 19 nt, Artificial
  Chemically Synthesized
aucaaagccuauuauggag

SEQ ID NO: 304 - RNA, 19 nt, Artificial
  Chemically Synthesized
ugagcacagaaagucauca

SEQ ID NO: 305 - RNA, 19 nt, Artificial
  Chemically Synthesized
cucagcacuugcucaguag

SEQ ID NO: 306 - RNA, 19 nt, Artificial
  Chemically Synthesized
uauaauaaacccucagcac

SEQ ID NO: 307 - RNA, 19 nt, Artificial
  Chemically Synthesized
gacuuuuuugauuaagugg

SEQ ID NO: 308 - RNA, 19 nt, Artificial
  Chemically Synthesized
gcuaagguguuuggaggcu

SEQ ID NO: 309 - RNA, 19 nt, Artificial
  Chemically Synthesized
agggcguuaauaccgaggu

SEQ ID NO: 310 - RNA, 19 nt, Artificial
  Chemically Synthesized
ugagcacagacccaagugu

SEQ ID NO: 311 - RNA, 19 nt, Artificial
  Chemically Synthesized
gucaucaaagccuauuaug

SEQ ID NO: 312 - RNA, 19 nt, Artificial
  Chemically Synthesized
uaaaccaaagacagcaucu

SEQ ID NO: 313 - RNA, 19 nt, Artificial
  Chemically Synthesized
ggagaaaaauuccucgucc

SEQ ID NO: 314 - RNA, 19 nt, Artificial
  Chemically Synthesized
uugcucaguaguuuuguga

SEQ ID NO: 315 - RNA, 19 nt, Artificial
  Chemically Synthesized
gagcuguauuaagugacug

SEQ ID NO: 316 - RNA, 19 nt, Artificial
  Chemically Synthesized
gcauuccaagcuggagaag

SEQ ID NO: 317 - RNA, 19 nt, Artificial
  Chemically Synthesized
ucugagccagcugaaaaca

SEQ ID NO: 318 - RNA, 19 nt, Artificial
  Chemically Synthesized
gccuuuguauuauaaaagc

SEQ ID NO: 319 - RNA, 19 nt, Artificial
  Chemically Synthesized
aagugacugaccaugcacu

SEQ ID NO: 320 - RNA, 19 nt, Artificial
  Chemically Synthesized
gagccagcugaaaacacug

SEQ ID NO: 321 - RNA, 19 nt, Artificial
  Chemically Synthesized
aaugaaagucugagccagc

SEQ ID NO: 322 - RNA, 19 nt, Artificial
  Chemically Synthesized
uggagaaaagacgaagagc

SEQ ID NO: 323 - RNA, 19 nt, Artificial
  Chemically Synthesized
auggagaaaagacgaagag

SEQ ID NO: 324 - RNA, 19 nt, Artificial
  Chemically Synthesized
ccaaagacagcaucugagc

SEQ ID NO: 325 - RNA, 19 nt, Artificial
  Chemically Synthesized
ucucuccuugguccuggaa

SEQ ID NO: 326 - RNA, 19 nt, Artificial
  Chemically Synthesized
ucguuuuuuacacgagauu

SEQ ID NO: 327 - RNA, 19 nt, Artificial
  Chemically Synthesized
acuuuuuguagagagagcu

SEQ ID NO: 328 - RNA, 19 nt, Artificial
  Chemically Synthesized
uuaagugguuacuuugugu

SEQ ID NO: 329 - RNA, 19 nt, Artificial
  Chemically Synthesized
aaacaggaacuugaauacu

SEQ ID NO: 330 - RNA, 19 nt, Artificial
  Chemically Synthesized
gaucaaugccaugaccuac

SEQ ID NO: 331 - RNA, 19 nt, Artificial
  Chemically Synthesized
uuauggagaaaagacgaag

SEQ ID NO: 332 - RNA, 19 nt, Artificial
  Chemically Synthesized
aacacgacaccggauaaac

SEQ ID NO: 333 - RNA, 19 nt, Artificial
  Chemically Synthesized
uggccaguuugcuuuccuc

SEQ ID NO: 334 - RNA, 19 nt, Artificial
  Chemically Synthesized
aacugcaugacccagauca

SEQ ID NO: 335 - RNA, 19 nt, Artificial
  Chemically Synthesized
ucugaagaaagauagcucg

SEQ ID NO: 336 - RNA, 19 nt, Artificial
  Chemically Synthesized
augcucugaagaaagauag

SEQ ID NO: 337 - RNA, 19 nt, Artificial
  Chemically Synthesized
cugagccagcugaaaacac

SEQ ID NO: 338 - RNA, 19 nt, Artificial
  Chemically Synthesized
accaaagacagcaucugag

SEQ ID NO: 339 - RNA, 19 nt, Artificial
  Chemically Synthesized
ugcugauaacagcggaauc

SEQ ID NO: 340 - RNA, 19 nt, Artificial
  Chemically Synthesized
ugugaugccaaagauguuu

SEQ ID NO: 341 - RNA, 19 nt, Artificial
  Chemically Synthesized
gacauucuggaaaugacag

SEQ ID NO: 342 - RNA, 19 nt, Artificial
  Chemically Synthesized
agacagcaucugagcacag

SEQ ID NO: 343 - RNA, 19 nt, Artificial
  Chemically Synthesized
gagaaaaauuccucguccc

SEQ ID NO: 344 - RNA, 19 nt, Artificial
  Chemically Synthesized
uucguuuuuuacacgagau

SEQ ID NO: 345 - RNA, 19 nt, Artificial
  Chemically Synthesized
cagaucaaugccaugaccu

SEQ ID NO: 346 - RNA, 19 nt, Artificial
  Chemically Synthesized
ugcaugacccagaucaaug

SEQ ID NO: 347 - RNA, 19 nt, Artificial
  Chemically Synthesized
acugaucaccaaguagcca

SEQ ID NO: 348 - RNA, 19 nt, Artificial
  Chemically Synthesized
acacgacaccggauaaacc

SEQ ID NO: 349 - RNA, 19 nt, Artificial
  Chemically Synthesized
uacuuuuuguagagagagc

SEQ ID NO: 350 - RNA, 19 nt, Artificial
  Chemically Synthesized
cugaagaaagauagcucgc

SEQ ID NO: 351 - RNA, 19 nt, Artificial
  Chemically Synthesized
agccagcugaaaacacuga

SEQ ID NO: 352 - RNA, 19 nt, Artificial
  Chemically Synthesized
aaagucaucaaagccuauu

SEQ ID NO: 353 - RNA, 19 nt, Artificial
  Chemically Synthesized
cugagcacagaaagucauc

SEQ ID NO: 354 - RNA, 19 nt, Artificial
  Chemically Synthesized
agucucaaguaaaagagac

SEQ ID NO: 355 - RNA, 19 nt, Artificial
  Chemically Synthesized
ugcucugaagaaagauagc

SEQ ID NO: 356 - RNA, 19 nt, Artificial
  Chemically Synthesized
uaaaauaucuuccuuuggg

SEQ ID NO: 357 - RNA, 19 nt, Artificial
  Chemically Synthesized
gugaugccaaagauguuug

SEQ ID NO: 358 - RNA, 19 nt, Artificial
  Chemically Synthesized
aauacugggagagaagagg

SEQ ID NO: 359 - RNA, 19 nt, Artificial
  Chemically Synthesized
aauaaaugaaagucugagc

SEQ ID NO: 360 - RNA, 19 nt, Artificial
  Chemically Synthesized
aaaccaaagacagcaucug

SEQ ID NO: 361 - RNA, 19 nt, Artificial
  Chemically Synthesized
aguuugcuuuccucauucc

SEQ ID NO: 362 - RNA, 19 nt, Artificial
  Chemically Synthesized
cuggaaaugacagugaagc

SEQ ID NO: 363 - RNA, 19 nt, Artificial
  Chemically Synthesized
cauuccaagcuggagaagg

SEQ ID NO: 364 - RNA, 19 nt, Artificial
  Chemically Synthesized
aacacugauuuuggaugcu

SEQ ID NO: 365 - RNA, 19 nt, Artificial
  Chemically Synthesized
uuuuuaugugaugccaaag

SEQ ID NO: 366 - RNA, 19 nt, Artificial
  Chemically Synthesized
aaagcucagaugacauuuc

SEQ ID NO: 367 - RNA, 19 nt, Artificial
  Chemically Synthesized
auucuggaaaugacaguga

SEQ ID NO: 368 - RNA, 19 nt, Artificial
  Chemically Synthesized
acagaaagucaucaaagcc

SEQ ID NO: 369 - RNA, 19 nt, Artificial
  Chemically Synthesized
augccagcugauauaaugg

SEQ ID NO: 370 - RNA, 19 nt, Artificial
  Chemically Synthesized
ucauauuggauugcgccuu

SEQ ID NO: 371 - RNA, 19 nt, Artificial
  Chemically Synthesized
guuugcuuuccucauuccc

SEQ ID NO: 372 - RNA, 19 nt, Artificial
  Chemically Synthesized
aagaaagauagcucgcggc

SEQ ID NO: 373 - RNA, 19 nt, Artificial
  Chemically Synthesized
auggagaaaaauuccucgu

SEQ ID NO: 374 - RNA, 19 nt, Artificial
  Chemically Synthesized
gucuaccucucuccuuggu

SEQ ID NO: 375 - RNA, 19 nt, Artificial
  Chemically Synthesized
aagauguuugaaaaugcuc

SEQ ID NO: 376 - RNA, 19 nt, Artificial
  Chemically Synthesized
uuuuuguagagagagcugu

SEQ ID NO: 377 - RNA, 19 nt, Artificial
  Chemically Synthesized
gaaaugacagugaagcacc

SEQ ID NO: 378 - RNA, 19 nt, Artificial
  Chemically Synthesized
ugcucuuaaaauaucuucc

SEQ ID NO: 379 - RNA, 19 nt, Artificial
  Chemically Synthesized
uauuaagugacugaccaug

SEQ ID NO: 380 - RNA, 19 nt, Artificial
  Chemically Synthesized
aaaacacugauuuuggaug

SEQ ID NO: 381 - RNA, 19 nt, Artificial
  Chemically Synthesized
ucaaugccaugaccuaccc

SEQ ID NO: 382 - RNA, 19 nt, Artificial
  Chemically Synthesized
acauucuggaaaugacagu

SEQ ID NO: 383 - RNA, 19 nt, Artificial
  Chemically Synthesized
ugaagaaagauagcucgcg

SEQ ID NO: 384 - RNA, 19 nt, Artificial
  Chemically Synthesized
uggagaaaaauuccucguc

SEQ ID NO: 385 - RNA, 19 nt, Artificial
  Chemically Synthesized
uuuuucgugaagaacucca

SEQ ID NO: 386 - RNA, 19 nt, Artificial
  Chemically Synthesized
uacugaucaccaaguagcc

SEQ ID NO: 387 - RNA, 19 nt, Artificial
  Chemically Synthesized
auuccaagcuggagaaggc

SEQ ID NO: 388 - RNA, 19 nt, Artificial
  Chemically Synthesized
caucugagcacagaaaguc

SEQ ID NO: 389 - RNA, 19 nt, Artificial
  Chemically Synthesized
aaagucucaaguaaaagag

SEQ ID NO: 390 - RNA, 19 nt, Artificial
  Chemically Synthesized
auauuggauugcgccuuug

SEQ ID NO: 391 - RNA, 19 nt, Artificial
  Chemically Synthesized
ucccuccggacucuaaaca

SEQ ID NO: 392 - RNA, 19 nt, Artificial
  Chemically Synthesized
caacugcaugacccagauc

SEQ ID NO: 393 - RNA, 19 nt, Artificial
  Chemically Synthesized
aaacacugauuuuggaugc

SEQ ID NO: 394 - RNA, 19 nt, Artificial
  Chemically Synthesized
aaagacagcaucugagcac

SEQ ID NO: 395 - RNA, 19 nt, Artificial
  Chemically Synthesized
aauggagaaaaauuccucg

SEQ ID NO: 396 - RNA, 19 nt, Artificial
  Chemically Synthesized
uucuuuuucgugaagaacu

SEQ ID NO: 397 - RNA, 19 nt, Artificial
  Chemically Synthesized
uuacuuuuuguagagagag

SEQ ID NO: 398 - RNA, 19 nt, Artificial
  Chemically Synthesized
acccagaucaaugccauga

SEQ ID NO: 399 - RNA, 19 nt, Artificial
  Chemically Synthesized
augacccagaucaaugcca

SEQ ID NO: 400 - RNA, 19 nt, Artificial
  Chemically Synthesized
cuucagcgagugcaugaac

SEQ ID NO: 401 - RNA, 19 nt, Artificial
  Chemically Synthesized
cauucuggaaaugacagug

SEQ ID NO: 402 - RNA, 19 nt, Artificial
  Chemically Synthesized
cacuugcucaguaguuuug

SEQ ID NO: 403 - RNA, 19 nt, Artificial
  Chemically Synthesized
auggccaguuugcuuuccu

SEQ ID NO: 404 - RNA, 19 nt, Artificial
  Chemically Synthesized
ugaaagucugagccagcug

SEQ ID NO: 405 - RNA, 19 nt, Artificial
  Chemically Synthesized
auuucguuuuuuacacgag

SEQ ID NO: 406 - RNA, 19 nt, Artificial
  Chemically Synthesized
uaagugguuacuuuguguu

SEQ ID NO: 407 - RNA, 19 nt, Artificial
  Chemically Synthesized
aauauaauaaacccucagc

SEQ ID NO: 408 - RNA, 19 nt, Artificial
  Chemically Synthesized
cuuuccucauucccaacgg

SEQ ID NO: 409 - RNA, 19 nt, Artificial
  Chemically Synthesized
cuacugaucaccaaguagc

SEQ ID NO: 410 - RNA, 19 nt, Artificial
  Chemically Synthesized
acauuucguuuuuuacacg

SEQ ID NO: 411 - RNA, 19 nt, Artificial
  Chemically Synthesized
guucauauuggauugcgcc

SEQ ID NO: 412 - RNA, 19 nt, Artificial
  Chemically Synthesized
uaagugacugaccaugcac

SEQ ID NO: 413 - RNA, 19 nt, Artificial
  Chemically Synthesized
auuaagugacugaccaugc

SEQ ID NO: 414 - RNA, 19 nt, Artificial
  Chemically Synthesized
cugaucaccaaguagccac

SEQ ID NO: 415 - RNA, 19 nt, Artificial
  Chemically Synthesized
uaauggagaaaaauuccuc

SEQ ID NO: 416 - RNA, 19 nt, Artificial
  Chemically Synthesized
uucccuccggacucuaaac

SEQ ID NO: 417 - RNA, 19 nt, Artificial
  Chemically Synthesized
gcuuuccucauucccaacg

SEQ ID NO: 418 - RNA, 19 nt, Artificial
  Chemically Synthesized
caugacccagaucaaugcc

SEQ ID NO: 419 - RNA, 19 nt, Artificial
  Chemically Synthesized
acacugauuuuggaugcuc

SEQ ID NO: 420 - RNA, 19 nt, Artificial
  Chemically Synthesized
auaaaccaaagacagcauc

SEQ ID NO: 421 - RNA, 19 nt, Artificial
  Chemically Synthesized
gcugauaacagcggaaucc

SEQ ID NO: 422 - RNA, 19 nt, Artificial
  Chemically Synthesized
uuaauaccgaggugcgcac

SEQ ID NO: 423 - RNA, 19 nt, Artificial
  Chemically Synthesized
cugauaacagcggaauccc

SEQ ID NO: 424 - RNA, 19 nt, Artificial
  Chemically Synthesized
uaaacccucagcacuugcu

SEQ ID NO: 425 - RNA, 19 nt, Artificial
  Chemically Synthesized
auuaagugguuacuuugug

SEQ ID NO: 426 - RNA, 19 nt, Artificial
  Chemically Synthesized
aacuugaauacugggagag

SEQ ID NO: 427 - RNA, 19 nt, Artificial
  Chemically Synthesized
aaacccucagcacuugcuc

SEQ ID NO: 428 - RNA, 19 nt, Artificial
  Chemically Synthesized
uaauaccgaggugcgcacu

SEQ ID NO: 429 - RNA, 19 nt, Artificial
  Chemically Synthesized
aagauagcucgcggcauuc

SEQ ID NO: 430 - RNA, 19 nt, Artificial
  Chemically Synthesized
ucucaaguaaaagagacac

SEQ ID NO: 431 - RNA, 19 nt, Artificial
  Chemically Synthesized
uucagcgagugcaugaacg

SEQ ID NO: 432 - RNA, 19 nt, Artificial
  Chemically Synthesized
auucuuuuucgugaagaac

SEQ ID NO: 433 - RNA, 19 nt, Artificial
  Chemically Synthesized
uucauauuggauugcgccu

SEQ ID NO: 434 - RNA, 19 nt, Artificial
  Chemically Synthesized
uuuccucauucccaacggg

SEQ ID NO: 435 - RNA, 19 nt, Artificial
  Chemically Synthesized
uaccucucuccuugguccu

SEQ ID NO: 436 - RNA, 19 nt, Artificial
  Chemically Synthesized
auaaaugaaagucugagcc

SEQ ID NO: 437 - RNA, 19 nt, Artificial
  Chemically Synthesized
cuuuuucgugaagaacucc

SEQ ID NO: 438 - RNA, 19 nt, Artificial
  Chemically Synthesized
auguucauauuggauugcg

SEQ ID NO: 439 - RNA, 19 nt, Artificial
  Chemically Synthesized
gauggccaguuugcuuucc

SEQ ID NO: 440 - RNA, 19 nt, Artificial
  Chemically Synthesized
aagguguuuggaggcuucc

SEQ ID NO: 441 - RNA, 19 nt, Artificial
  Chemically Synthesized
augacagugaagcaccucc

SEQ ID NO: 442 - RNA, 19 nt, Artificial
  Chemically Synthesized
uucuuuuuuaugugaugcc

SEQ ID NO: 443 - RNA, 19 nt, Artificial
  Chemically Synthesized
aucaaugccaugaccuacc

SEQ ID NO: 444 - RNA, 19 nt, Artificial
  Chemically Synthesized
ucuaccucucuccuugguc

SEQ ID NO: 445 - RNA, 19 nt, Artificial
  Chemically Synthesized
auaaacccucagcacuugc

SEQ ID NO: 446 - RNA, 19 nt, Artificial
  Chemically Synthesized
aaugacagugaagcaccuc

SEQ ID NO: 447 - RNA, 19 nt, Artificial
  Chemically Synthesized
uauguucauauuggauugc

SEQ ID NO: 448 - RNA, 19 nt, Artificial
  Chemically Synthesized
aacagcgcuacugaucacc

SEQ ID NO: 449 - RNA, 19 nt, Artificial
  Chemically Synthesized
uuuuauaauacaaaggcgc

SEQ ID NO: 450 - RNA, 19 nt, Artificial
  Chemically Synthesized
uuugugucucuuuuacuug

SEQ ID NO: 451 - RNA, 19 nt, Artificial
  Chemically Synthesized
uucaaguuccuguuuagag

SEQ ID NO: 452 - RNA, 19 nt, Artificial
  Chemically Synthesized
uuccgcuguuaucagcacc

SEQ ID NO: 453 - RNA, 19 nt, Artificial
  Chemically Synthesized
uuuucaaacaucuuuggca

SEQ ID NO: 454 - RNA, 19 nt, Artificial
  Chemically Synthesized
uucucucccaguauucaag

SEQ ID NO: 455 - RNA, 19 nt, Artificial
  Chemically Synthesized
uuguuugugucucuuuuac

SEQ ID NO: 456 - RNA, 19 nt, Artificial
  Chemically Synthesized
auuuuuggaguucuucacg

SEQ ID NO: 457 - RNA, 19 nt, Artificial
  Chemically Synthesized
ucucccaguauucaaguuc

SEQ ID NO: 458 - RNA, 19 nt, Artificial
  Chemically Synthesized
ugucauuuccagaaugucc

SEQ ID NO: 459 - RNA, 19 nt, Artificial
  Chemically Synthesized
ugcucuucgucuuuucucc

SEQ ID NO: 460 - RNA, 19 nt, Artificial
  Chemically Synthesized
uuucugugcucagaugcug

SEQ ID NO: 461 - RNA, 19 nt, Artificial
  Chemically Synthesized
uaggcuuugaugacuuucu

SEQ ID NO: 462 - RNA, 19 nt, Artificial
  Chemically Synthesized
uuugaugacuuucugugcu

SEQ ID NO: 463 - RNA, 19 nt, Artificial
  Chemically Synthesized
uuuagaguccggagggaag

SEQ ID NO: 464 - RNA, 19 nt, Artificial
  Chemically Synthesized
aaaaaaguccucuucucuc

SEQ ID NO: 465 - RNA, 19 nt, Artificial
  Chemically Synthesized
uuuuguggcuacuugguga

SEQ ID NO: 466 - RNA, 19 nt, Artificial
  Chemically Synthesized
ucuuuucuccauaauaggc

SEQ ID NO: 467 - RNA, 19 nt, Artificial
  Chemically Synthesized
uucuccagcuuggaaugcc

SEQ ID NO: 468 - RNA, 19 nt, Artificial
  Chemically Synthesized
uccaaaaucaguguuuuca

SEQ ID NO: 469 - RNA, 19 nt, Artificial
  Chemically Synthesized
uuuuuggaguucuucacga

SEQ ID NO: 470 - RNA, 19 nt, Artificial
  Chemically Synthesized
uuggcaucacauaaaaaag

SEQ ID NO: 471 - RNA, 19 nt, Artificial
  Chemically Synthesized
ucucucuacaaaaaguaac

SEQ ID NO: 472 - RNA, 19 nt, Artificial
  Chemically Synthesized
uuuucagcuggcucagacu

SEQ ID NO: 473 - RNA, 19 nt, Artificial
  Chemically Synthesized
ucuccauuauaucagcugg

SEQ ID NO: 474 - RNA, 19 nt, Artificial
  Chemically Synthesized
aaaaguccucuucucuccc

SEQ ID NO: 475 - RNA, 19 nt, Artificial
  Chemically Synthesized
uugaucugggucaugcagu

SEQ ID NO: 476 - RNA, 19 nt, Artificial
  Chemically Synthesized
uuuucuccauuauaucagc

SEQ ID NO: 477 - RNA, 19 nt, Artificial
  Chemically Synthesized
uugggaaugaggaaagcaa

SEQ ID NO: 478 - RNA, 19 nt, Artificial
  Chemically Synthesized
uucagagcauccaaaauca

SEQ ID NO: 479 - RNA, 19 nt, Artificial
  Chemically Synthesized
uugugucucuuuuacuuga

SEQ ID NO: 480 - RNA, 19 nt, Artificial
  Chemically Synthesized
aucuuucuucagagcaucc

SEQ ID NO: 481 - RNA, 19 nt, Artificial
  Chemically Synthesized
aucaguagcgcuguuccag

SEQ ID NO: 482 - RNA, 19 nt, Artificial
  Chemically Synthesized
ugcugucuuugguuuaucc

SEQ ID NO: 483 - RNA, 19 nt, Artificial
  Chemically Synthesized
uguuaucagcaccagcucc

SEQ ID NO: 484 - RNA, 19 nt, Artificial
  Chemically Synthesized
uucacaaaacuacugagca

SEQ ID NO: 485 - RNA, 19 nt, Artificial
  Chemically Synthesized
aucaaaaaaguccucuucu

SEQ ID NO: 486 - RNA, 19 nt, Artificial
  Chemically Synthesized
aaaaaguccucuucucucc

SEQ ID NO: 487 - RNA, 19 nt, Artificial
  Chemically Synthesized
uuucuucagagcauccaaa

SEQ ID NO: 488 - RNA, 19 nt, Artificial
  Chemically Synthesized
uguuugugucucuuuuacu

SEQ ID NO: 489 - RNA, 19 nt, Artificial
  Chemically Synthesized
uuuauaauacaaaggcgca

SEQ ID NO: 490 - RNA, 19 nt, Artificial
  Chemically Synthesized
augaggaaagcaaacuggc

SEQ ID NO: 491 - RNA, 19 nt, Artificial
  Chemically Synthesized
uucacugucauuuccagaa

SEQ ID NO: 492 - RNA, 19 nt, Artificial
  Chemically Synthesized
agagcauccaaaaucagug

SEQ ID NO: 493 - RNA, 19 nt, Artificial
  Chemically Synthesized
auggucagucacuuaauac

SEQ ID NO: 494 - RNA, 19 nt, Artificial
  Chemically Synthesized
cuucagagcauccaaaauc

SEQ ID NO: 495 - RNA, 19 nt, Artificial
  Chemically Synthesized
acuuucugugcucagaugc

SEQ ID NO: 496 - RNA, 19 nt, Artificial
  Chemically Synthesized
uucugugcucagaugcugu

SEQ ID NO: 497 - RNA, 19 nt, Artificial
  Chemically Synthesized
uuucuccauuauaucagcu

SEQ ID NO: 498 - RNA, 19 nt, Artificial
  Chemically Synthesized
uauuuuuggaguucuucac

SEQ ID NO: 499 - RNA, 19 nt, Artificial
  Chemically Synthesized
uuuggaguucuucacgaaa

SEQ ID NO: 500 - RNA, 19 nt, Artificial
  Chemically Synthesized
uaggucauggcauugaucu

SEQ ID NO: 501 - RNA, 19 nt, Artificial
  Chemically Synthesized
uuggaaugccgcgagcuau

SEQ ID NO: 502 - RNA, 19 nt, Artificial
  Chemically Synthesized
uacuuggugaucaguagcg

SEQ ID NO: 503 - RNA, 19 nt, Artificial
  Chemically Synthesized
ucagcuggcucagacuuuc

SEQ ID NO: 504 - RNA, 19 nt, Artificial
  Chemically Synthesized
uauuuuguggcuacuuggu

SEQ ID NO: 505 - RNA, 19 nt, Artificial
  Chemically Synthesized
ugcuucacugucauuucca

SEQ ID NO: 506 - RNA, 19 nt, Artificial
  Chemically Synthesized
uucagcuggcucagacuuu

SEQ ID NO: 507 - RNA, 19 nt, Artificial
  Chemically Synthesized
uucuugcucuucgucuuuu

SEQ ID NO: 508 - RNA, 19 nt, Artificial
  Chemically Synthesized
ucaaaaaaguccucuucuc

SEQ ID NO: 509 - RNA, 19 nt, Artificial
  Chemically Synthesized
uccgcuguuaucagcacca

SEQ ID NO: 510 - RNA, 19 nt, Artificial
  Chemically Synthesized
auacaaauauagugcaugg

SEQ ID NO: 511 - RNA, 19 nt, Artificial
  Chemically Synthesized
aaaaucaguguuuucagcu

SEQ ID NO: 512 - RNA, 19 nt, Artificial
  Chemically Synthesized
ucaaacaucuuuggcauca

SEQ ID NO: 513 - RNA, 19 nt, Artificial
  Chemically Synthesized
uacagcucucucuacaaaa

SEQ ID NO: 514 - RNA, 19 nt, Artificial
  Chemically Synthesized
augccgcgagcuaucuuuc

SEQ ID NO: 515 - RNA, 19 nt, Artificial
  Chemically Synthesized
ucagucacuuaauacagcu

SEQ ID NO: 516 - RNA, 19 nt, Artificial
  Chemically Synthesized
gucauuuccagaauguccg

SEQ ID NO: 517 - RNA, 19 nt, Artificial
  Chemically Synthesized
uaauaggcuuugaugacuu

SEQ ID NO: 518 - RNA, 19 nt, Artificial
  Chemically Synthesized
uugagacuuucacaaaacu

SEQ ID NO: 519 - RNA, 19 nt, Artificial
  Chemically Synthesized
uuucaaacaucuuuggcau

SEQ ID NO: 520 - RNA, 19 nt, Artificial
  Chemically Synthesized
uggucagucacuuaauaca

SEQ ID NO: 521 - RNA, 19 nt, Artificial
  Chemically Synthesized
aaucaaaaaaguccucuuc

SEQ ID NO: 522 - RNA, 19 nt, Artificial
  Chemically Synthesized
uuccuguuuagaguccgga

SEQ ID NO: 523 - RNA, 19 nt, Artificial
  Chemically Synthesized
auuuuguggcuacuuggug

SEQ ID NO: 524 - RNA, 19 nt, Artificial
  Chemically Synthesized
auugaucugggucaugcag

SEQ ID NO: 525 - RNA, 19 nt, Artificial
  Chemically Synthesized
ucuucgucuuuucuccaua

SEQ ID NO: 526 - RNA, 19 nt, Artificial
  Chemically Synthesized
ucgucuuuucuccauaaua

SEQ ID NO: 527 - RNA, 19 nt, Artificial
  Chemically Synthesized
uacaaaggcgcaauccaau

SEQ ID NO: 528 - RNA, 19 nt, Artificial
  Chemically Synthesized
cacuuaaucaaaaaagucc

SEQ ID NO: 529 - RNA, 19 nt, Artificial
  Chemically Synthesized
uuagaguccggagggaaga

SEQ ID NO: 530 - RNA, 19 nt, Artificial
  Chemically Synthesized
cuuuucuccauaauaggcu

SEQ ID NO: 531 - RNA, 19 nt, Artificial
  Chemically Synthesized
agucacuuaauacagcucu

SEQ ID NO: 532 - RNA, 19 nt, Artificial
  Chemically Synthesized
uucuucagagcauccaaaa

SEQ ID NO: 533 - RNA, 19 nt, Artificial
  Chemically Synthesized
uuucagcuggcucagacuu

SEQ ID NO: 534 - RNA, 19 nt, Artificial
  Chemically Synthesized
uugguuuauccggugucgu

SEQ ID NO: 535 - RNA, 19 nt, Artificial
  Chemically Synthesized
auuauaucagcuggcauuu

SEQ ID NO: 536 - RNA, 19 nt, Artificial
  Chemically Synthesized
uauaauacaaaggcgcaau

SEQ ID NO: 537 - RNA, 19 nt, Artificial
  Chemically Synthesized
ucuucucucccaguauuca

SEQ ID NO: 538 - RNA, 19 nt, Artificial
  Chemically Synthesized
ucucucccaguauucaagu

SEQ ID NO: 539 - RNA, 19 nt, Artificial
  Chemically Synthesized
uuucuccauaauaggcuuu

SEQ ID NO: 540 - RNA, 19 nt, Artificial
  Chemically Synthesized
ugagacuuucacaaaacua

SEQ ID NO: 541 - RNA, 19 nt, Artificial
  Chemically Synthesized
aagagcauuuucaaacauc

SEQ ID NO: 542 - RNA, 19 nt, Artificial
  Chemically Synthesized
aaaaacacaaaguaaccac

SEQ ID NO: 543 - RNA, 19 nt, Artificial
  Chemically Synthesized
aaguccucuucucucccag

SEQ ID NO: 544 - RNA, 19 nt, Artificial
  Chemically Synthesized
uauuaacgcccucgcacgu

SEQ ID NO: 545 - RNA, 19 nt, Artificial
  Chemically Synthesized
auaauaggcuuugaugacu

SEQ ID NO: 546 - RNA, 19 nt, Artificial
  Chemically Synthesized
uuuccagaauguccgccuu

SEQ ID NO: 547 - RNA, 19 nt, Artificial
  Chemically Synthesized
uuuucuccauaauaggcuu

SEQ ID NO: 548 - RNA, 19 nt, Artificial
  Chemically Synthesized
aaacgaaaugucaucugag

SEQ ID NO: 549 - RNA, 19 nt, Artificial
  Chemically Synthesized
auuuucaaacaucuuuggc

SEQ ID NO: 550 - RNA, 19 nt, Artificial
  Chemically Synthesized
uacugagcaagugcugagg

SEQ ID NO: 551 - RNA, 19 nt, Artificial
  Chemically Synthesized
cuuaauacagcucucucua

SEQ ID NO: 552 - RNA, 19 nt, Artificial
  Chemically Synthesized
auucaaguuccuguuuaga

SEQ ID NO: 553 - RNA, 19 nt, Artificial
  Chemically Synthesized
aguuccuguuuagaguccg

SEQ ID NO: 554 - RNA, 19 nt, Artificial
  Chemically Synthesized
uguuccaggaccaaggaga

SEQ ID NO: 555 - RNA, 19 nt, Artificial
  Chemically Synthesized
gcauuuucaaacaucuuug

SEQ ID NO: 556 - RNA, 19 nt, Artificial
  Chemically Synthesized
ucucguguaaaaaacgaaa

SEQ ID NO: 557 - RNA, 19 nt, Artificial
  Chemically Synthesized
uagugcauggucagucacu

SEQ ID NO: 558 - RNA, 19 nt, Artificial
  Chemically Synthesized
cucccaguauucaaguucc

SEQ ID NO: 559 - RNA, 19 nt, Artificial
  Chemically Synthesized
uucaugcacucgcugaagc

SEQ ID NO: 560 - RNA, 19 nt, Artificial
  Chemically Synthesized
ucauuuccagaauguccgc

SEQ ID NO: 561 - RNA, 19 nt, Artificial
  Chemically Synthesized
auccaaaaucaguguuuuc

SEQ ID NO: 562 - RNA, 19 nt, Artificial
  Chemically Synthesized
auucuugcucuucgucuuu

SEQ ID NO: 563 - RNA, 19 nt, Artificial
  Chemically Synthesized
aaaaacgaaaugucaucug

SEQ ID NO: 564 - RNA, 19 nt, Artificial
  Chemically Synthesized
acgaaaugucaucugagcu

SEQ ID NO: 565 - RNA, 19 nt, Artificial
  Chemically Synthesized
cucuucucucccaguauuc

SEQ ID NO: 566 - RNA, 19 nt, Artificial
  Chemically Synthesized
ccaguauucaaguuccugu

SEQ ID NO: 567 - RNA, 19 nt, Artificial
  Chemically Synthesized
ugaggaaagcaaacuggcc

SEQ ID NO: 568 - RNA, 19 nt, Artificial
  Chemically Synthesized
uguggcuacuuggugauca

SEQ ID NO: 569 - RNA, 19 nt, Artificial
  Chemically Synthesized
ugugcucagaugcugucuu

SEQ ID NO: 570 - RNA, 19 nt, Artificial
  Chemically Synthesized
ugucuuugguuuauccggu

SEQ ID NO: 571 - RNA, 19 nt, Artificial
  Chemically Synthesized
cuccauuauaucagcuggc

SEQ ID NO: 572 - RNA, 19 nt, Artificial
  Chemically Synthesized
uuauaucagcuggcauuuu

SEQ ID NO: 573 - RNA, 19 nt, Artificial
  Chemically Synthesized
ucucuuuuacuugagacuu

SEQ ID NO: 574 - RNA, 19 nt, Artificial
  Chemically Synthesized
uggaaggugacacugcguu

SEQ ID NO: 575 - RNA, 19 nt, Artificial
  Chemically Synthesized
cauggcauugaucuggguc

SEQ ID NO: 576 - RNA, 19 nt, Artificial
  Chemically Synthesized
ucaccucguucaugcacuc

SEQ ID NO: 577 - RNA, 19 nt, Artificial
  Chemically Synthesized
uccagaauguccgccuucu

SEQ ID NO: 578 - RNA, 19 nt, Artificial
  Chemically Synthesized
ugccgcgagcuaucuuucu

SEQ ID NO: 579 - RNA, 19 nt, Artificial
  Chemically Synthesized
ucugugcucagaugcuguc

SEQ ID NO: 580 - RNA, 19 nt, Artificial
  Chemically Synthesized
cugucuuugguuuauccgg

SEQ ID NO: 581 - RNA, 19 nt, Artificial
  Chemically Synthesized
ugguuuauccggugucgug

SEQ ID NO: 582 - RNA, 19 nt, Artificial
  Chemically Synthesized
aaaacuacugagcaagugc

SEQ ID NO: 583 - RNA, 19 nt, Artificial
  Chemically Synthesized
agagcauuuucaaacaucu

SEQ ID NO: 584 - RNA, 19 nt, Artificial
  Chemically Synthesized
augucaucugagcuuuuau

SEQ ID NO: 585 - RNA, 19 nt, Artificial
  Chemically Synthesized
cucuacaaaaaguaacuuc

SEQ ID NO: 586 - RNA, 19 nt, Artificial
  Chemically Synthesized
uccuguuuagaguccggag

SEQ ID NO: 587 - RNA, 19 nt, Artificial
  Chemically Synthesized
acuuggugaucaguagcgc

SEQ ID NO: 588 - RNA, 19 nt, Artificial
  Chemically Synthesized
aaucaguguuuucagcugg

SEQ ID NO: 589 - RNA, 19 nt, Artificial
  Chemically Synthesized
uucgucuuuucuccauaau

SEQ ID NO: 590 - RNA, 19 nt, Artificial
  Chemically Synthesized
ugcucagaugcugucuuug

SEQ ID NO: 591 - RNA, 19 nt, Artificial
  Chemically Synthesized
ugucucuuuuacuugagac

SEQ ID NO: 592 - RNA, 19 nt, Artificial
  Chemically Synthesized
acuuucacaaaacuacuga

SEQ ID NO: 593 - RNA, 19 nt, Artificial
  Chemically Synthesized
auagugcauggucagucac

SEQ ID NO: 594 - RNA, 19 nt, Artificial
  Chemically Synthesized
auggcauugaucuggguca

SEQ ID NO: 595 - RNA, 19 nt, Artificial
  Chemically Synthesized
ccgcgagcuaucuuucuuc

SEQ ID NO: 596 - RNA, 19 nt, Artificial
  Chemically Synthesized
ucuuugguuuauccggugu

SEQ ID NO: 597 - RNA, 19 nt, Artificial
  Chemically Synthesized
uuggaguucuucacgaaaa

SEQ ID NO: 598 - RNA, 19 nt, Artificial
  Chemically Synthesized
guuugugucucuuuuacuu

SEQ ID NO: 599 - RNA, 19 nt, Artificial
  Chemically Synthesized
cuuuuauaauacaaaggcg

SEQ ID NO: 600 - RNA, 19 nt, Artificial
  Chemically Synthesized
ugcugaggguuuauuauau

SEQ ID NO: 601 - RNA, 19 nt, Artificial
  Chemically Synthesized
uccucuucucucccaguau

SEQ ID NO: 602 - RNA, 19 nt, Artificial
  Chemically Synthesized
cauuuccagaauguccgcc

SEQ ID NO: 603 - RNA, 19 nt, Artificial
  Chemically Synthesized
agaauguccgccuucucca

SEQ ID NO: 604 - RNA, 19 nt, Artificial
  Chemically Synthesized
agacuuucacaaaacuacu

SEQ ID NO: 605 - RNA, 19 nt, Artificial
  Chemically Synthesized
uucaaacaucuuuggcauc

SEQ ID NO: 606 - RNA, 19 nt, Artificial
  Chemically Synthesized
aacaucuuuggcaucacau

SEQ ID NO: 607 - RNA, 19 nt, Artificial
  Chemically Synthesized
auacaaaggcgcaauccaa

SEQ ID NO: 608 - RNA, 19 nt, Artificial
  Chemically Synthesized
ucguucaugcacucgcuga

SEQ ID NO: 609 - RNA, 19 nt, Artificial
  Chemically Synthesized
gucuuuucuccauaauagg

SEQ ID NO: 610 - RNA, 19 nt, Artificial
  Chemically Synthesized
ugucguguugacacuggcu

SEQ ID NO: 611 - RNA, 19 nt, Artificial
  Chemically Synthesized
gagacuuucacaaaacuac

SEQ ID NO: 612 - RNA, 19 nt, Artificial
  Chemically Synthesized
aagccuccaaacaccuuag

SEQ ID NO: 613 - RNA, 19 nt, Artificial
  Chemically Synthesized
gucaccucguucaugcacu

SEQ ID NO: 614 - RNA, 19 nt, Artificial
  Chemically Synthesized
aggugcuucacugucauuu

SEQ ID NO: 615 - RNA, 19 nt, Artificial
  Chemically Synthesized
cuugcucuucgucuuuucu

SEQ ID NO: 616 - RNA, 19 nt, Artificial
  Chemically Synthesized
uuuuggaguucuucacgaa

SEQ ID NO: 617 - RNA, 19 nt, Artificial
  Chemically Synthesized
uggcaucacauaaaaaaga

SEQ ID NO: 618 - RNA, 19 nt, Artificial
  Chemically Synthesized
aaauauagugcauggucag

SEQ ID NO: 619 - RNA, 19 nt, Artificial
  Chemically Synthesized
aaaacacaaaguaaccacu

SEQ ID NO: 620 - RNA, 19 nt, Artificial
  Chemically Synthesized
caaaaaaguccucuucucu

SEQ ID NO: 621 - RNA, 19 nt, Artificial
  Chemically Synthesized
uggaagccuccaaacaccu

SEQ ID NO: 622 - RNA, 19 nt, Artificial
  Chemically Synthesized
aguguuuucagcuggcuca

SEQ ID NO: 623 - RNA, 19 nt, Artificial
  Chemically Synthesized
aggcuuugaugacuuucug

SEQ ID NO: 624 - RNA, 19 nt, Artificial
  Chemically Synthesized
aggaagauauuuuaagagc

SEQ ID NO: 625 - RNA, 19 nt, Artificial
  Chemically Synthesized
ugcgcaccucgguauuaac

SEQ ID NO: 626 - RNA, 19 nt, Artificial
  Chemically Synthesized
ucagagcauccaaaaucag

SEQ ID NO: 627 - RNA, 19 nt, Artificial
  Chemically Synthesized
guuuucagcuggcucagac

SEQ ID NO: 628 - RNA, 19 nt, Artificial
  Chemically Synthesized
uccauuauaucagcuggca

SEQ ID NO: 629 - RNA, 19 nt, Artificial
  Chemically Synthesized
aaacacaaaguaaccacuu

SEQ ID NO: 630 - RNA, 19 nt, Artificial
  Chemically Synthesized
cccaguauucaaguuccug

SEQ ID NO: 631 - RNA, 19 nt, Artificial
  Chemically Synthesized
aaguuccuguuuagagucc

SEQ ID NO: 632 - RNA, 19 nt, Artificial
  Chemically Synthesized
uuuguggcuacuuggugau

SEQ ID NO: 633 - RNA, 19 nt, Artificial
  Chemically Synthesized
uuguggcuacuuggugauc

SEQ ID NO: 634 - RNA, 19 nt, Artificial
  Chemically Synthesized
cuggcucagacuuucauuu

SEQ ID NO: 635 - RNA, 19 nt, Artificial
  Chemically Synthesized
cucagacuuucauuuauuc

SEQ ID NO: 636 - RNA, 19 nt, Artificial
  Chemically Synthesized
cgucuuuucuccauaauag

SEQ ID NO: 637 - RNA, 19 nt, Artificial
  Chemically Synthesized
ugacuuucugugcucagau

SEQ ID NO: 638 - RNA, 19 nt, Artificial
  Chemically Synthesized
cuugagacuuucacaaaac

SEQ ID NO: 639 - RNA, 19 nt, Artificial
  Chemically Synthesized
ucguguaaaaaacgaaaug

SEQ ID NO: 640 - RNA, 19 nt, Artificial
  Chemically Synthesized
ucccaguauucaaguuccu

SEQ ID NO: 641 - RNA, 19 nt, Artificial
  Chemically Synthesized
guuccuguuuagaguccgg

SEQ ID NO: 642 - RNA, 19 nt, Artificial
  Chemically Synthesized
ugggaaugaggaaagcaaa

SEQ ID NO: 643 - RNA, 19 nt, Artificial
  Chemically Synthesized
gugcuucacugucauuucc

SEQ ID NO: 644 - RNA, 19 nt, Artificial
  Chemically Synthesized
guguaaaaaacgaaauguc

SEQ ID NO: 645 - RNA, 19 nt, Artificial
  Chemically Synthesized
ucuucagagcauccaaaau

SEQ ID NO: 646 - RNA, 19 nt, Artificial
  Chemically Synthesized
uggcucagacuuucauuua

SEQ ID NO: 647 - RNA, 19 nt, Artificial
  Chemically Synthesized
auccggugucguguugaca

SEQ ID NO: 648 - RNA, 19 nt, Artificial
  Chemically Synthesized
cacaaaacuacugagcaag

SEQ ID NO: 649 - RNA, 19 nt, Artificial
  Chemically Synthesized
ucuuuggcaucacauaaaa

SEQ ID NO: 650 - RNA, 19 nt, Artificial
  Chemically Synthesized
aaaucucguguaaaaaacg

SEQ ID NO: 651 - RNA, 19 nt, Artificial
  Chemically Synthesized
gcgcaauccaauaugaaca

SEQ ID NO: 652 - RNA, 19 nt, Artificial
  Chemically Synthesized
aauauagugcauggucagu

SEQ ID NO: 653 - RNA, 19 nt, Artificial
  Chemically Synthesized
cuucucucccaguauucaa

SEQ ID NO: 654 - RNA, 19 nt, Artificial
  Chemically Synthesized
ugugucucuuuuacuugag

SEQ ID NO: 655 - RNA, 19 nt, Artificial
  Chemically Synthesized
aauacagcucucucuacaa

SEQ ID NO: 656 - RNA, 19 nt, Artificial
  Chemically Synthesized
cucucuacaaaaaguaacu

SEQ ID NO: 657 - RNA, 19 nt, Artificial
  Chemically Synthesized
caaaguaaccacuuaauca

SEQ ID NO: 658 - RNA, 19 nt, Artificial
  Chemically Synthesized
cuuaaucaaaaaaguccuc

SEQ ID NO: 659 - RNA, 19 nt, Artificial
  Chemically Synthesized
aucaguguuuucagcuggc

SEQ ID NO: 660 - RNA, 19 nt, Artificial
  Chemically Synthesized
acuacugagcaagugcuga

SEQ ID NO: 661 - RNA, 19 nt, Artificial
  Chemically Synthesized
acaaaguaaccacuuaauc

SEQ ID NO: 662 - RNA, 19 nt, Artificial
  Chemically Synthesized
gaagccuccaaacaccuua

SEQ ID NO: 663 - RNA, 19 nt, Artificial
  Chemically Synthesized
cuacuuggugaucaguagc

SEQ ID NO: 664 - RNA, 19 nt, Artificial
  Chemically Synthesized
cagagcauccaaaaucagu

SEQ ID NO: 665 - RNA, 19 nt, Artificial
  Chemically Synthesized
ccaaaaucaguguuuucag

SEQ ID NO: 666 - RNA, 19 nt, Artificial
  Chemically Synthesized
auuccgcuguuaucagcac

SEQ ID NO: 667 - RNA, 19 nt, Artificial
  Chemically Synthesized
caucuuuggcaucacauaa

SEQ ID NO: 668 - RNA, 19 nt, Artificial
  Chemically Synthesized
aauacaaaggcgcaaucca

SEQ ID NO: 669 - RNA, 19 nt, Artificial
  Chemically Synthesized
gucagucacuuaauacagc

SEQ ID NO: 670 - RNA, 19 nt, Artificial
  Chemically Synthesized
aguccucuucucucccagu

SEQ ID NO: 671 - RNA, 19 nt, Artificial
  Chemically Synthesized
gcuguuaucagcaccagcu

SEQ ID NO: 672 - RNA, 19 nt, Artificial
  Chemically Synthesized
ucuccauaauaggcuuuga

SEQ ID NO: 673 - RNA, 19 nt, Artificial
  Chemically Synthesized
gcugucuuugguuuauccg

SEQ ID NO: 674 - RNA, 19 nt, Artificial
  Chemically Synthesized
gaguucuucacgaaaaaga

SEQ ID NO: 675 - RNA, 19 nt, Artificial
  Chemically Synthesized
cuuuuacuugagacuuuca

SEQ ID NO: 676 - RNA, 19 nt, Artificial
  Chemically Synthesized
acuugagacuuucacaaaa

SEQ ID NO: 677 - RNA, 19 nt, Artificial
  Chemically Synthesized
cuuucacaaaacuacugag

SEQ ID NO: 678 - RNA, 19 nt, Artificial
  Chemically Synthesized
caaguuccuguuuagaguc

SEQ ID NO: 679 - RNA, 19 nt, Artificial
  Chemically Synthesized
cuuucuucagagcauccaa

SEQ ID NO: 680 - RNA, 19 nt, Artificial
  Chemically Synthesized
acaaaggcgcaauccaaua

SEQ ID NO: 681 - RNA, 19 nt, Artificial
  Chemically Synthesized
gucacuuaauacagcucuc

SEQ ID NO: 682 - RNA, 19 nt, Artificial
  Chemically Synthesized
cuucacugucauuuccaga

SEQ ID NO: 683 - RNA, 19 nt, Artificial
  Chemically Synthesized
cuuucugugcucagaugcu

SEQ ID NO: 684 - RNA, 19 nt, Artificial
  Chemically Synthesized
cauuuucaaacaucuuugg

SEQ ID NO: 685 - RNA, 19 nt, Artificial
  Chemically Synthesized
aaaacgaaaugucaucuga

SEQ ID NO: 686 - RNA, 19 nt, Artificial
  Chemically Synthesized
uggugaucaguagcgcugu

SEQ ID NO: 687 - RNA, 19 nt, Artificial
  Chemically Synthesized
augacuuucugugcucaga

SEQ ID NO: 688 - RNA, 19 nt, Artificial
  Chemically Synthesized
aaacuacugagcaagugcu

SEQ ID NO: 689 - RNA, 19 nt, Artificial
  Chemically Synthesized
aacuacugagcaagugcug

SEQ ID NO: 690 - RNA, 19 nt, Artificial
  Chemically Synthesized
agugcugaggguuuauuau

SEQ ID NO: 691 - RNA, 19 nt, Artificial
  Chemically Synthesized
accuggaagccuccaaaca

SEQ ID NO: 692 - RNA, 19 nt, Artificial
  Chemically Synthesized
aaaucaguguuuucagcug

SEQ ID NO: 693 - RNA, 19 nt, Artificial
  Chemically Synthesized
ccauaauaggcuuugauga

SEQ ID NO: 694 - RNA, 19 nt, Artificial
  Chemically Synthesized
acaaaacuacugagcaagu

SEQ ID NO: 695 - RNA, 19 nt, Artificial
  Chemically Synthesized
ggucagucacuuaauacag

SEQ ID NO: 696 - RNA, 19 nt, Artificial
  Chemically Synthesized
auacagcucucucuacaaa

SEQ ID NO: 697 - RNA, 19 nt, Artificial
  Chemically Synthesized
cagcucucucuacaaaaag

SEQ ID NO: 698 - RNA, 19 nt, Artificial
  Chemically Synthesized
guccucuucucucccagua

SEQ ID NO: 699 - RNA, 19 nt, Artificial
  Chemically Synthesized
ggucauggcauugaucugg

SEQ ID NO: 700 - RNA, 19 nt, Artificial
  Chemically Synthesized
gcauugaucugggucaugc

SEQ ID NO: 701 - RNA, 19 nt, Artificial
  Chemically Synthesized
gagcuaucuuucuucagag

SEQ ID NO: 702 - RNA, 19 nt, Artificial
  Chemically Synthesized
caaaaucaguguuuucagc

SEQ ID NO: 703 - RNA, 19 nt, Artificial
  Chemically Synthesized
gucuuugguuuauccggug

SEQ ID NO: 704 - RNA, 19 nt, Artificial
  Chemically Synthesized
gacuuucacaaaacuacug

SEQ ID NO: 705 - RNA, 19 nt, Artificial
  Chemically Synthesized
gaaaucucguguaaaaaac

SEQ ID NO: 706 - RNA, 19 nt, Artificial
  Chemically Synthesized
ugagcaagugcugaggguu

SEQ ID NO: 707 - RNA, 19 nt, Artificial
  Chemically Synthesized
aaaugucaucugagcuuuu

SEQ ID NO: 708 - RNA, 19 nt, Artificial
  Chemically Synthesized
gucaucugagcuuuuauaa

SEQ ID NO: 709 - RNA, 19 nt, Artificial
  Chemically Synthesized
guugggaaugaggaaagca

SEQ ID NO: 710 - RNA, 19 nt, Artificial
  Chemically Synthesized
gaaagcaaacuggccaucg

SEQ ID NO: 711 - RNA, 19 nt, Artificial
  Chemically Synthesized
gucauggcauugaucuggg

SEQ ID NO: 712 - RNA, 19 nt, Artificial
  Chemically Synthesized
agcuaucuuucuucagagc

SEQ ID NO: 713 - RNA, 19 nt, Artificial
  Chemically Synthesized
cuuggugaucaguagcgcu

SEQ ID NO: 714 - RNA, 19 nt, Artificial
  Chemically Synthesized
agcuggcucagacuuucau

SEQ ID NO: 715 - RNA, 19 nt, Artificial
  Chemically Synthesized
cuccauaauaggcuuugau

SEQ ID NO: 716 - RNA, 19 nt, Artificial
  Chemically Synthesized
ugaugacuuucugugcuca

SEQ ID NO: 717 - RNA, 19 nt, Artificial
  Chemically Synthesized
cuacugagcaagugcugag

SEQ ID NO: 718 - RNA, 19 nt, Artificial
  Chemically Synthesized
gugcugaggguuuauuaua

SEQ ID NO: 719 - RNA, 19 nt, Artificial
  Chemically Synthesized
ccacuuaaucaaaaaaguc

SEQ ID NO: 720 - RNA, 19 nt, Artificial
  Chemically Synthesized
agccuccaaacaccuuagc

SEQ ID NO: 721 - RNA, 19 nt, Artificial
  Chemically Synthesized
accucgguauuaacgcccu

SEQ ID NO: 722 - RNA, 19 nt, Artificial
  Chemically Synthesized
acacuugggucugugcuca

SEQ ID NO: 723 - RNA, 19 nt, Artificial
  Chemically Synthesized
cauaauaggcuuugaugac

SEQ ID NO: 724 - RNA, 19 nt, Artificial
  Chemically Synthesized
agaugcugucuuugguuua

SEQ ID NO: 725 - RNA, 19 nt, Artificial
  Chemically Synthesized
ggacgaggaauuuuucucc

SEQ ID NO: 726 - RNA, 19 nt, Artificial
  Chemically Synthesized
ucacaaaacuacugagcaa

SEQ ID NO: 727 - RNA, 19 nt, Artificial
  Chemically Synthesized
cagucacuuaauacagcuc

SEQ ID NO: 728 - RNA, 19 nt, Artificial
  Chemically Synthesized
cuucuccagcuuggaaugc

SEQ ID NO: 729 - RNA, 19 nt, Artificial
  Chemically Synthesized
uguuuucagcuggcucaga

SEQ ID NO: 730 - RNA, 19 nt, Artificial
  Chemically Synthesized
gcuuuuauaauacaaaggc

SEQ ID NO: 731 - RNA, 19 nt, Artificial
  Chemically Synthesized
agugcauggucagucacuu

SEQ ID NO: 732 - RNA, 19 nt, Artificial
  Chemically Synthesized
caguguuuucagcuggcuc

SEQ ID NO: 733 - RNA, 19 nt, Artificial
  Chemically Synthesized
gcuggcucagacuuucauu

SEQ ID NO: 734 - RNA, 19 nt, Artificial
  Chemically Synthesized
gcucuucgucuuuucucca

SEQ ID NO: 735 - RNA, 19 nt, Artificial
  Chemically Synthesized
cucuucgucuuuucuccau

SEQ ID NO: 736 - RNA, 19 nt, Artificial
  Chemically Synthesized
gcucagaugcugucuuugg

SEQ ID NO: 737 - RNA, 19 nt, Artificial
  Chemically Synthesized
uuccaggaccaaggagaga

SEQ ID NO: 738 - RNA, 19 nt, Artificial
  Chemically Synthesized
aaucucguguaaaaaacga

SEQ ID NO: 739 - RNA, 19 nt, Artificial
  Chemically Synthesized
agcucucucuacaaaaagu

SEQ ID NO: 740 - RNA, 19 nt, Artificial
  Chemically Synthesized
acacaaaguaaccacuuaa

SEQ ID NO: 741 - RNA, 19 nt, Artificial
  Chemically Synthesized
aguauucaaguuccuguuu

SEQ ID NO: 742 - RNA, 19 nt, Artificial
  Chemically Synthesized
guaggucauggcauugauc

SEQ ID NO: 743 - RNA, 19 nt, Artificial
  Chemically Synthesized
cuucgucuuuucuccauaa

SEQ ID NO: 744 - RNA, 19 nt, Artificial
  Chemically Synthesized
guuuauccggugucguguu

SEQ ID NO: 745 - RNA, 19 nt, Artificial
  Chemically Synthesized
gaggaaagcaaacuggcca

SEQ ID NO: 746 - RNA, 19 nt, Artificial
  Chemically Synthesized
ugaucugggucaugcaguu

SEQ ID NO: 747 - RNA, 19 nt, Artificial
  Chemically Synthesized
cgagcuaucuuucuucaga

SEQ ID NO: 748 - RNA, 19 nt, Artificial
  Chemically Synthesized
cuaucuuucuucagagcau

SEQ ID NO: 749 - RNA, 19 nt, Artificial
  Chemically Synthesized
guguuuucagcuggcucag

SEQ ID NO: 750 - RNA, 19 nt, Artificial
  Chemically Synthesized
cucagaugcugucuuuggu

SEQ ID NO: 751 - RNA, 19 nt, Artificial
  Chemically Synthesized
gauuccgcuguuaucagca

SEQ ID NO: 752 - RNA, 19 nt, Artificial
  Chemically Synthesized
aaacaucuuuggcaucaca

SEQ ID NO: 753 - RNA, 19 nt, Artificial
  Chemically Synthesized
cugucauuuccagaauguc

SEQ ID NO: 754 - RNA, 19 nt, Artificial
  Chemically Synthesized
cugugcucagaugcugucu

SEQ ID NO: 755 - RNA, 19 nt, Artificial
  Chemically Synthesized
gggacgaggaauuuuucuc

SEQ ID NO: 756 - RNA, 19 nt, Artificial
  Chemically Synthesized
aucucguguaaaaaacgaa

SEQ ID NO: 757 - RNA, 19 nt, Artificial
  Chemically Synthesized
aggucauggcauugaucug

SEQ ID NO: 758 - RNA, 19 nt, Artificial
  Chemically Synthesized
cauugaucugggucaugca

SEQ ID NO: 759 - RNA, 19 nt, Artificial
  Chemically Synthesized
uggcuacuuggugaucagu

SEQ ID NO: 760 - RNA, 19 nt, Artificial
  Chemically Synthesized
gguuuauccggugucgugu

SEQ ID NO: 761 - RNA, 19 nt, Artificial
  Chemically Synthesized
gcucucucuacaaaaagua

SEQ ID NO: 762 - RNA, 19 nt, Artificial
  Chemically Synthesized
gcgagcuaucuuucuucag

SEQ ID NO: 763 - RNA, 19 nt, Artificial
  Chemically Synthesized
ucaguguuuucagcuggcu

SEQ ID NO: 764 - RNA, 19 nt, Artificial
  Chemically Synthesized
aauaggcuuugaugacuuu

SEQ ID NO: 765 - RNA, 19 nt, Artificial
  Chemically Synthesized
gaugacuuucugugcucag

SEQ ID NO: 766 - RNA, 19 nt, Artificial
  Chemically Synthesized
gucucuuuuacuugagacu

SEQ ID NO: 767 - RNA, 19 nt, Artificial
  Chemically Synthesized
gcuaucuuucuucagagca

SEQ ID NO: 768 - RNA, 19 nt, Artificial
  Chemically Synthesized
cccaaaggaagauauuuua

SEQ ID NO: 769 - RNA, 19 nt, Artificial
  Chemically Synthesized
caaacaucuuuggcaucac

SEQ ID NO: 770 - RNA, 19 nt, Artificial
  Chemically Synthesized
ccucuucucucccaguauu

SEQ ID NO: 771 - RNA, 19 nt, Artificial
  Chemically Synthesized
gcucagacuuucauuuauu

SEQ ID NO: 772 - RNA, 19 nt, Artificial
  Chemically Synthesized
cagaugcugucuuugguuu

SEQ ID NO: 773 - RNA, 19 nt, Artificial
  Chemically Synthesized
ggaaugaggaaagcaaacu

SEQ ID NO: 774 - RNA, 19 nt, Artificial
  Chemically Synthesized
gcuucacugucauuuccag

SEQ ID NO: 775 - RNA, 19 nt, Artificial
  Chemically Synthesized
ccuucuccagcuuggaaug

SEQ ID NO: 776 - RNA, 19 nt, Artificial
  Chemically Synthesized
agcauccaaaaucaguguu

SEQ ID NO: 777 - RNA, 19 nt, Artificial
  Chemically Synthesized
cuuuggcaucacauaaaaa

SEQ ID NO: 778 - RNA, 19 nt, Artificial
  Chemically Synthesized
gaaaugucaucugagcuuu

SEQ ID NO: 779 - RNA, 19 nt, Artificial
  Chemically Synthesized
ucacugucauuuccagaau

SEQ ID NO: 780 - RNA, 19 nt, Artificial
  Chemically Synthesized
ggcuuugaugacuuucugu

SEQ ID NO: 781 - RNA, 19 nt, Artificial
  Chemically Synthesized
ccauuauaucagcuggcau

SEQ ID NO: 782 - RNA, 19 nt, Artificial
  Chemically Synthesized
aaggcgcaauccaauauga

SEQ ID NO: 783 - RNA, 19 nt, Artificial
  Chemically Synthesized
gggaaugaggaaagcaaac

SEQ ID NO: 784 - RNA, 19 nt, Artificial
  Chemically Synthesized
gccgcgagcuaucuuucuu

SEQ ID NO: 785 - RNA, 19 nt, Artificial
  Chemically Synthesized
acgaggaauuuuucuccau

SEQ ID NO: 786 - RNA, 19 nt, Artificial
  Chemically Synthesized
accaaggagagagguagac

SEQ ID NO: 787 - RNA, 19 nt, Artificial
  Chemically Synthesized
gagcauuuucaaacaucuu

SEQ ID NO: 788 - RNA, 19 nt, Artificial
  Chemically Synthesized
acagcucucucuacaaaaa

SEQ ID NO: 789 - RNA, 19 nt, Artificial
  Chemically Synthesized
ggugcuucacugucauuuc

SEQ ID NO: 790 - RNA, 19 nt, Artificial
  Chemically Synthesized
ggaagauauuuuaagagca

SEQ ID NO: 791 - RNA, 19 nt, Artificial
  Chemically Synthesized
cauggucagucacuuaaua

SEQ ID NO: 792 - RNA, 19 nt, Artificial
  Chemically Synthesized
cauccaaaaucaguguuuu

SEQ ID NO: 793 - RNA, 19 nt, Artificial
  Chemically Synthesized
ggguaggucauggcauuga

SEQ ID NO: 794 - RNA, 19 nt, Artificial
  Chemically Synthesized
acugucauuuccagaaugu

SEQ ID NO: 795 - RNA, 19 nt, Artificial
  Chemically Synthesized
cgcgagcuaucuuucuuca

SEQ ID NO: 796 - RNA, 19 nt, Artificial
  Chemically Synthesized
gacgaggaauuuuucucca

SEQ ID NO: 797 - RNA, 19 nt, Artificial
  Chemically Synthesized
uggaguucuucacgaaaaa

SEQ ID NO: 798 - RNA, 19 nt, Artificial
  Chemically Synthesized
ggcuacuuggugaucagua

SEQ ID NO: 799 - RNA, 19 nt, Artificial
  Chemically Synthesized
gccuucuccagcuuggaau

SEQ ID NO: 800 - RNA, 19 nt, Artificial
  Chemically Synthesized
gacuuucugugcucagaug

SEQ ID NO: 801 - RNA, 19 nt, Artificial
  Chemically Synthesized
cucuuuuacuugagacuuu

SEQ ID NO: 802 - RNA, 19 nt, Artificial
  Chemically Synthesized
caaaggcgcaauccaauau

SEQ ID NO: 803 - RNA, 19 nt, Artificial
  Chemically Synthesized
uguuuagaguccggaggga

SEQ ID NO: 804 - RNA, 19 nt, Artificial
  Chemically Synthesized
gaucugggucaugcaguug

SEQ ID NO: 805 - RNA, 19 nt, Artificial
  Chemically Synthesized
gcauccaaaaucaguguuu

SEQ ID NO: 806 - RNA, 19 nt, Artificial
  Chemically Synthesized
gugcucagaugcugucuuu

SEQ ID NO: 807 - RNA, 19 nt, Artificial
  Chemically Synthesized
cgaggaauuuuucuccauu

SEQ ID NO: 808 - RNA, 19 nt, Artificial
  Chemically Synthesized
aguucuucacgaaaaagaa

SEQ ID NO: 809 - RNA, 19 nt, Artificial
  Chemically Synthesized
cucucucuacaaaaaguaa

SEQ ID NO: 810 - RNA, 19 nt, Artificial
  Chemically Synthesized
ucauggcauugaucugggu

SEQ ID NO: 811 - RNA, 19 nt, Artificial
  Chemically Synthesized
uggcauugaucugggucau

SEQ ID NO: 812 - RNA, 19 nt, Artificial
  Chemically Synthesized
guucaugcacucgcugaag

SEQ ID NO: 813 - RNA, 19 nt, Artificial
  Chemically Synthesized
cacugucauuuccagaaug

SEQ ID NO: 814 - RNA, 19 nt, Artificial
  Chemically Synthesized
caaaacuacugagcaagug

SEQ ID NO: 815 - RNA, 19 nt, Artificial
  Chemically Synthesized
aggaaagcaaacuggccau

SEQ ID NO: 816 - RNA, 19 nt, Artificial
  Chemically Synthesized
cagcuggcucagacuuuca

SEQ ID NO: 817 - RNA, 19 nt, Artificial
  Chemically Synthesized
cucguguaaaaaacgaaau

SEQ ID NO: 818 - RNA, 19 nt, Artificial
  Chemically Synthesized
aacacaaaguaaccacuua

SEQ ID NO: 819 - RNA, 19 nt, Artificial
  Chemically Synthesized
gcugaggguuuauuauauu

SEQ ID NO: 820 - RNA, 19 nt, Artificial
  Chemically Synthesized
ccguugggaaugaggaaag

SEQ ID NO: 821 - RNA, 19 nt, Artificial
  Chemically Synthesized
gcuacuuggugaucaguag

SEQ ID NO: 822 - RNA, 19 nt, Artificial
  Chemically Synthesized
cguguaaaaaacgaaaugu

SEQ ID NO: 823 - RNA, 19 nt, Artificial
  Chemically Synthesized
ggcgcaauccaauaugaac

SEQ ID NO: 824 - RNA, 19 nt, Artificial
  Chemically Synthesized
gugcauggucagucacuua

SEQ ID NO: 825 - RNA, 19 nt, Artificial
  Chemically Synthesized
gcauggucagucacuuaau

SEQ ID NO: 826 - RNA, 19 nt, Artificial
  Chemically Synthesized
guggcuacuuggugaucag

SEQ ID NO: 827 - RNA, 19 nt, Artificial
  Chemically Synthesized
gaggaauuuuucuccauua

SEQ ID NO: 828 - RNA, 19 nt, Artificial
  Chemically Synthesized
guuuagaguccggagggaa

SEQ ID NO: 829 - RNA, 19 nt, Artificial
  Chemically Synthesized
cguugggaaugaggaaagc

SEQ ID NO: 830 - RNA, 19 nt, Artificial
  Chemically Synthesized
ggcauugaucugggucaug

SEQ ID NO: 831 - RNA, 19 nt, Artificial
  Chemically Synthesized
gagcauccaaaaucagugu

SEQ ID NO: 832 - RNA, 19 nt, Artificial
  Chemically Synthesized
gaugcugucuuugguuuau

SEQ ID NO: 833 - RNA, 19 nt, Artificial
  Chemically Synthesized
ggauuccgcuguuaucagc

SEQ ID NO: 834 - RNA, 19 nt, Artificial
  Chemically Synthesized
gugcgcaccucgguauuaa

SEQ ID NO: 835 - RNA, 19 nt, Artificial
  Chemically Synthesized
gggauuccgcuguuaucag

SEQ ID NO: 836 - RNA, 19 nt, Artificial
  Chemically Synthesized
agcaagugcugaggguuua

SEQ ID NO: 837 - RNA, 19 nt, Artificial
  Chemically Synthesized
cacaaaguaaccacuuaau

SEQ ID NO: 838 - RNA, 19 nt, Artificial
  Chemically Synthesized
cucucccaguauucaaguu

SEQ ID NO: 839 - RNA, 19 nt, Artificial
  Chemically Synthesized
gagcaagugcugaggguuu

SEQ ID NO: 840 - RNA, 19 nt, Artificial
  Chemically Synthesized
agugcgcaccucgguauua

SEQ ID NO: 841 - RNA, 19 nt, Artificial
  Chemically Synthesized
gaaugccgcgagcuaucuu

SEQ ID NO: 842 - RNA, 19 nt, Artificial
  Chemically Synthesized
gugucucuuuuacuugaga

SEQ ID NO: 843 - RNA, 19 nt, Artificial
  Chemically Synthesized
cguucaugcacucgcugaa

SEQ ID NO: 844 - RNA, 19 nt, Artificial
  Chemically Synthesized
guucuucacgaaaaagaau

SEQ ID NO: 845 - RNA, 19 nt, Artificial
  Chemically Synthesized
aggcgcaauccaauaugaa

SEQ ID NO: 846 - RNA, 19 nt, Artificial
  Chemically Synthesized
cccguugggaaugaggaaa

SEQ ID NO: 847 - RNA, 19 nt, Artificial
  Chemically Synthesized
aggaccaaggagagaggua

SEQ ID NO: 848 - RNA, 19 nt, Artificial
  Chemically Synthesized
ggcucagacuuucauuuau

SEQ ID NO: 849 - RNA, 19 nt, Artificial
  Chemically Synthesized
ggaguucuucacgaaaaag

SEQ ID NO: 850 - RNA, 19 nt, Artificial
  Chemically Synthesized
cgcaauccaauaugaacau

SEQ ID NO: 851 - RNA, 19 nt, Artificial
  Chemically Synthesized
ggaaagcaaacuggccauc

SEQ ID NO: 852 - RNA, 19 nt, Artificial
  Chemically Synthesized
ggaagccuccaaacaccuu

SEQ ID NO: 853 - RNA, 19 nt, Artificial
  Chemically Synthesized
ggaggugcuucacugucau

SEQ ID NO: 854 - RNA, 19 nt, Artificial
  Chemically Synthesized
ggcaucacauaaaaaagaa

SEQ ID NO: 855 - RNA, 19 nt, Artificial
  Chemically Synthesized
gguaggucauggcauugau

SEQ ID NO: 856 - RNA, 19 nt, Artificial
  Chemically Synthesized
gaccaaggagagagguaga

SEQ ID NO: 857 - RNA, 19 nt, Artificial
  Chemically Synthesized
gcaagugcugaggguuuau

SEQ ID NO: 858 - RNA, 19 nt, Artificial
  Chemically Synthesized
gaggugcuucacugucauu

SEQ ID NO: 859 - RNA, 19 nt, Artificial
  Chemically Synthesized
gcaauccaauaugaacaua

SEQ ID NO: 860 - RNA, 19 nt, Artificial
  Chemically Synthesized
ggugaucaguagcgcuguu

SEQ ID NO: 861 - RNA, 23 nt, Artificial
  Chemically Synthesized
cauucuggaaaugacagugaagc

SEQ ID NO: 862 - RNA, 23 nt, Artificial
  Chemically Synthesized
acauucuggaaaugacagugaag

SEQ ID NO: 863 - RNA, 23 nt, Artificial
  Chemically Synthesized
gacauucuggaaaugacagugaa

SEQ ID NO: 864 - RNA, 23 nt, Artificial
  Chemically Synthesized
aacacugauuuuggaugcucuga

SEQ ID NO: 865 - RNA, 23 nt, Artificial
  Chemically Synthesized
aaacacugauuuuggaugcucug

SEQ ID NO: 866 - RNA, 23 nt, Artificial
  Chemically Synthesized
aaaacacugauuuuggaugcucu

SEQ ID NO: 867 - RNA, 23 nt, Artificial
  Chemically Synthesized
guauuaagugacugaccaugcac

SEQ ID NO: 868 - RNA, 23 nt, Artificial
  Chemically Synthesized
uguauuaagugacugaccaugca

SEQ ID NO: 869 - RNA, 23 nt, Artificial
  Chemically Synthesized
cuguauuaagugacugaccaugc

SEQ ID NO: 870 - RNA, 23 nt, Artificial
  Chemically Synthesized
gcuguauuaagugacugaccaug

SEQ ID NO: 871 - RNA, 23 nt, Artificial
  Chemically Synthesized
agcuguauuaagugacugaccau

SEQ ID NO: 872 - RNA, 23 nt, Artificial
  Chemically Synthesized
gcaucugagcacagaaagucauc

SEQ ID NO: 873 - RNA, 23 nt, Artificial
  Chemically Synthesized
agcaucugagcacagaaagucau

SEQ ID NO: 874 - RNA, 23 nt, Artificial
  Chemically Synthesized
aaagacagcaucugagcacagaa

SEQ ID NO: 875 - RNA, 23 nt, Artificial
  Chemically Synthesized
gugaagaacuccaaaaauaaaau

SEQ ID NO: 876 - RNA, 23 nt, Artificial
  Chemically Synthesized
cuuuuucgugaagaacuccaaaa

SEQ ID NO: 877 - RNA, 23 nt, Artificial
  Chemically Synthesized
ucuuuuucgugaagaacuccaaa

SEQ ID NO: 878 - RNA, 23 nt, Artificial
  Chemically Synthesized
agaucaaugccaugaccuacccc

SEQ ID NO: 879 - RNA, 23 nt, Artificial
  Chemically Synthesized
cagaucaaugccaugaccuaccc

SEQ ID NO: 880 - RNA, 23 nt, Artificial
  Chemically Synthesized
ccagaucaaugccaugaccuacc

SEQ ID NO: 881 - RNA, 23 nt, Artificial
  Chemically Synthesized
cccagaucaaugccaugaccuac

SEQ ID NO: 882 - RNA, 23 nt, Artificial
  Chemically Synthesized
acccagaucaaugccaugaccua

SEQ ID NO: 883 - RNA, 23 nt, Artificial
  Chemically Synthesized
auagcucgcggcauuccaagcug

SEQ ID NO: 884 - RNA, 23 nt, Artificial
  Chemically Synthesized
gauagcucgcggcauuccaagcu

SEQ ID NO: 885 - RNA, 23 nt, Artificial
  Chemically Synthesized
agauagcucgcggcauuccaagc

SEQ ID NO: 886 - RNA, 23 nt, Artificial
  Chemically Synthesized
aagauagcucgcggcauuccaag

SEQ ID NO: 887 - RNA, 23 nt, Artificial
  Chemically Synthesized
aaagauagcucgcggcauuccaa

SEQ ID NO: 888 - RNA, 23 nt, Artificial
  Chemically Synthesized
cgcuacugaucaccaaguagcca

SEQ ID NO: 889 - RNA, 23 nt, Artificial
  Chemically Synthesized
gcgcuacugaucaccaaguagcc

SEQ ID NO: 890 - RNA, 23 nt, Artificial
  Chemically Synthesized
agcgcuacugaucaccaaguagc

SEQ ID NO: 891 - RNA, 23 nt, Artificial
  Chemically Synthesized
augaaagucugagccagcugaaa

SEQ ID NO: 892 - RNA, 23 nt, Artificial
  Chemically Synthesized
aaugaaagucugagccagcugaa

SEQ ID NO: 893 - RNA, 23 nt, Artificial
  Chemically Synthesized
aaaugaaagucugagccagcuga

SEQ ID NO: 894 - RNA, 23 nt, Artificial
  Chemically Synthesized
uggaaaugacagugaagcaccuc

SEQ ID NO: 895 - RNA, 23 nt, Artificial
  Chemically Synthesized
cuggaaaugacagugaagcaccu

SEQ ID NO: 896 - RNA, 23 nt, Artificial
  Chemically Synthesized
ucuggaaaugacagugaagcacc

SEQ ID NO: 897 - RNA, 23 nt, Artificial
  Chemically Synthesized
ccggacucuaaacaggaacuuga

SEQ ID NO: 898 - RNA, 23 nt, Artificial
  Chemically Synthesized
ccaguuugcuuuccucauuccca

SEQ ID NO: 899 - RNA, 23 nt, Artificial
  Chemically Synthesized
gagcuggugcugauaacagcgga

SEQ ID NO: 900 - RNA, 23 nt, Artificial
  Chemically Synthesized
uggaacagcgcuacugaucacca

SEQ ID NO: 901 - RNA, 23 nt, Artificial
  Chemically Synthesized
ccaugcacuauauuuguauauau

SEQ ID NO: 902 - RNA, 23 nt, Artificial
  Chemically Synthesized
accaugcacuauauuuguauaua

SEQ ID NO: 903 - RNA, 23 nt, Artificial
  Chemically Synthesized
gaccaugcacuauauuuguauau

SEQ ID NO: 904 - RNA, 23 nt, Artificial
  Chemically Synthesized
ugaccaugcacuauauuuguaua

SEQ ID NO: 905 - RNA, 23 nt, Artificial
  Chemically Synthesized
cugaccaugcacuauauuuguau

SEQ ID NO: 906 - RNA, 23 nt, Artificial
  Chemically Synthesized
ccagcugaaaacacugauuuugg

SEQ ID NO: 907 - RNA, 23 nt, Artificial
  Chemically Synthesized
gccagcugaaaacacugauuuug

SEQ ID NO: 908 - RNA, 23 nt, Artificial
  Chemically Synthesized
agccagcugaaaacacugauuuu

SEQ ID NO: 909 - RNA, 23 nt, Artificial
  Chemically Synthesized
ugugaugccaaagauguuugaaa

SEQ ID NO: 910 - RNA, 23 nt, Artificial
  Chemically Synthesized
augugaugccaaagauguuugaa

SEQ ID NO: 911 - RNA, 23 nt, Artificial
  Chemically Synthesized
uaugugaugccaaagauguuuga

SEQ ID NO: 912 - RNA, 23 nt, Artificial
  Chemically Synthesized
cuuuuuguagagagagcuguauu

SEQ ID NO: 913 - RNA, 23 nt, Artificial
  Chemically Synthesized
acuuuuuguagagagagcuguau

SEQ ID NO: 914 - RNA, 23 nt, Artificial
  Chemically Synthesized
uacuuuuuguagagagagcugua

SEQ ID NO: 915 - RNA, 23 nt, Artificial
  Chemically Synthesized
gaaagauagcucgcggcauucca

SEQ ID NO: 916 - RNA, 23 nt, Artificial
  Chemically Synthesized
agaaagauagcucgcggcauucc

SEQ ID NO: 917 - RNA, 23 nt, Artificial
  Chemically Synthesized
aagaaagauagcucgcggcauuc

SEQ ID NO: 918 - RNA, 23 nt, Artificial
  Chemically Synthesized
gaagaaagauagcucgcggcauu

SEQ ID NO: 919 - RNA, 23 nt, Artificial
  Chemically Synthesized
ugaagaaagauagcucgcggcau

SEQ ID NO: 920 - RNA, 23 nt, Artificial
  Chemically Synthesized
gagcuguauuaagugacugacca

SEQ ID NO: 921 - RNA, 23 nt, Artificial
  Chemically Synthesized
agagcuguauuaagugacugacc

SEQ ID NO: 922 - RNA, 23 nt, Artificial
  Chemically Synthesized
gagagcuguauuaagugacugac

SEQ ID NO: 923 - RNA, 23 nt, Artificial
  Chemically Synthesized
agagagcuguauuaagugacuga

SEQ ID NO: 924 - RNA, 23 nt, Artificial
  Chemically Synthesized
agagagagcuguauuaagugacu

SEQ ID NO: 925 - RNA, 23 nt, Artificial
  Chemically Synthesized
uagagagagcuguauuaagugac

SEQ ID NO: 926 - RNA, 23 nt, Artificial
  Chemically Synthesized
aaagucaucaaagccuauuaugg

SEQ ID NO: 927 - RNA, 23 nt, Artificial
  Chemically Synthesized
gaaagucucaaguaaaagagaca

SEQ ID NO: 928 - RNA, 23 nt, Artificial
  Chemically Synthesized
ugaaagucucaaguaaaagagac

SEQ ID NO: 929 - RNA, 23 nt, Artificial
  Chemically Synthesized
uaguuuugugaaagucucaagua

SEQ ID NO: 930 - RNA, 23 nt, Artificial
  Chemically Synthesized
guaguuuugugaaagucucaagu

SEQ ID NO: 931 - RNA, 23 nt, Artificial
  Chemically Synthesized
aguaguuuugugaaagucucaag

SEQ ID NO: 932 - RNA, 23 nt, Artificial
  Chemically Synthesized
caguaguuuugugaaagucucaa

SEQ ID NO: 933 - RNA, 23 nt, Artificial
  Chemically Synthesized
gagagagcuguauuaagugacug

SEQ ID NO: 934 - RNA, 23 nt, Artificial
  Chemically Synthesized
gaagaggacuuuuuugauuaagu

SEQ ID NO: 935 - RNA, 23 nt, Artificial
  Chemically Synthesized
uccggacucuaaacaggaacuug

SEQ ID NO: 936 - RNA, 23 nt, Artificial
  Chemically Synthesized
cuccggacucuaaacaggaacuu

SEQ ID NO: 937 - RNA, 23 nt, Artificial
  Chemically Synthesized
ccuccggacucuaaacaggaacu

SEQ ID NO: 938 - RNA, 23 nt, Artificial
  Chemically Synthesized
cccuccggacucuaaacaggaac

SEQ ID NO: 939 - RNA, 23 nt, Artificial
  Chemically Synthesized
ucccuccggacucuaaacaggaa

SEQ ID NO: 940 - RNA, 23 nt, Artificial
  Chemically Synthesized
cugcaugacccagaucaaugcca

SEQ ID NO: 941 - RNA, 23 nt, Artificial
  Chemically Synthesized
auuauggagaaaagacgaagagc

SEQ ID NO: 942 - RNA, 23 nt, Artificial
  Chemically Synthesized
uauuauggagaaaagacgaagag

SEQ ID NO: 943 - RNA, 23 nt, Artificial
  Chemically Synthesized
cuauuauggagaaaagacgaaga

SEQ ID NO: 944 - RNA, 23 nt, Artificial
  Chemically Synthesized
ccuauuauggagaaaagacgaag

SEQ ID NO: 945 - RNA, 23 nt, Artificial
  Chemically Synthesized
auauuggauugcgccuuuguauu

SEQ ID NO: 946 - RNA, 23 nt, Artificial
  Chemically Synthesized
cauauuggauugcgccuuuguau

SEQ ID NO: 947 - RNA, 23 nt, Artificial
  Chemically Synthesized
ucauauuggauugcgccuuugua

SEQ ID NO: 948 - RNA, 23 nt, Artificial
  Chemically Synthesized
uaagugacugaccaugcacuaua

SEQ ID NO: 949 - RNA, 23 nt, Artificial
  Chemically Synthesized
uuaagugacugaccaugcacuau

SEQ ID NO: 950 - RNA, 23 nt, Artificial
  Chemically Synthesized
auuaagugacugaccaugcacua

SEQ ID NO: 951 - RNA, 23 nt, Artificial
  Chemically Synthesized
uauuaagugacugaccaugcacu

SEQ ID NO: 952 - RNA, 23 nt, Artificial
  Chemically Synthesized
aggacuuuuuugauuaagugguu

SEQ ID NO: 953 - RNA, 23 nt, Artificial
  Chemically Synthesized
gaggacuuuuuugauuaaguggu

SEQ ID NO: 954 - RNA, 23 nt, Artificial
  Chemically Synthesized
agaggacuuuuuugauuaagugg

SEQ ID NO: 955 - RNA, 23 nt, Artificial
  Chemically Synthesized
aagaggacuuuuuugauuaagug

SEQ ID NO: 956 - RNA, 23 nt, Artificial
  Chemically Synthesized
ccucucuucccuccggacucuaa

SEQ ID NO: 957 - RNA, 23 nt, Artificial
  Chemically Synthesized
aaccaaagacagcaucugagcac

SEQ ID NO: 958 - RNA, 23 nt, Artificial
  Chemically Synthesized
aaaccaaagacagcaucugagca

SEQ ID NO: 959 - RNA, 23 nt, Artificial
  Chemically Synthesized
uaaaccaaagacagcaucugagc

SEQ ID NO: 960 - RNA, 23 nt, Artificial
  Chemically Synthesized
auaaaccaaagacagcaucugag

SEQ ID NO: 961 - RNA, 23 nt, Artificial
  Chemically Synthesized
gauaaaccaaagacagcaucuga

SEQ ID NO: 962 - RNA, 23 nt, Artificial
  Chemically Synthesized
acugaccaugcacuauauuugua

SEQ ID NO: 963 - RNA, 23 nt, Artificial
  Chemically Synthesized
aaaugccagcugauauaauggag

SEQ ID NO: 964 - RNA, 23 nt, Artificial
  Chemically Synthesized
aaaaugccagcugauauaaugga

SEQ ID NO: 965 - RNA, 23 nt, Artificial
  Chemically Synthesized
ugaauacugggagagaagaggac

SEQ ID NO: 966 - RNA, 23 nt, Artificial
  Chemically Synthesized
uugaauacugggagagaagagga

SEQ ID NO: 967 - RNA, 23 nt, Artificial
  Chemically Synthesized
cuaaacaggaacuugaauacugg

SEQ ID NO: 968 - RNA, 23 nt, Artificial
  Chemically Synthesized
ucuaaacaggaacuugaauacug

SEQ ID NO: 969 - RNA, 23 nt, Artificial
  Chemically Synthesized
ucaguaguuuugugaaagucuca

SEQ ID NO: 970 - RNA, 23 nt, Artificial
  Chemically Synthesized
gauguuugaaaaugcucuuaaaa

SEQ ID NO: 971 - RNA, 23 nt, Artificial
  Chemically Synthesized
agauguuugaaaaugcucuuaaa

SEQ ID NO: 972 - RNA, 23 nt, Artificial
  Chemically Synthesized
aagauguuugaaaaugcucuuaa

SEQ ID NO: 973 - RNA, 23 nt, Artificial
  Chemically Synthesized
aaagauguuugaaaaugcucuua

SEQ ID NO: 974 - RNA, 23 nt, Artificial
  Chemically Synthesized
caaagauguuugaaaaugcucuu

SEQ ID NO: 975 - RNA, 23 nt, Artificial
  Chemically Synthesized
gugguuacuuuguguuuuuuuaa

SEQ ID NO: 976 - RNA, 23 nt, Artificial
  Chemically Synthesized
agugguuacuuuguguuuuuuua

SEQ ID NO: 977 - RNA, 23 nt, Artificial
  Chemically Synthesized
aagugguuacuuuguguuuuuuu

SEQ ID NO: 978 - RNA, 23 nt, Artificial
  Chemically Synthesized
uaagugguuacuuuguguuuuuu

SEQ ID NO: 979 - RNA, 23 nt, Artificial
  Chemically Synthesized
uuaagugguuacuuuguguuuuu

SEQ ID NO: 980 - RNA, 23 nt, Artificial
  Chemically Synthesized
auacugggagagaagaggacuuu

SEQ ID NO: 981 - RNA, 23 nt, Artificial
  Chemically Synthesized
aauacugggagagaagaggacuu

SEQ ID NO: 982 - RNA, 23 nt, Artificial
  Chemically Synthesized
acgugcgagggcguuaauaccga

SEQ ID NO: 983 - RNA, 23 nt, Artificial
  Chemically Synthesized
cacgugcgagggcguuaauaccg

SEQ ID NO: 984 - RNA, 23 nt, Artificial
  Chemically Synthesized
ccacgugcgagggcguuaauacc

SEQ ID NO: 985 - RNA, 23 nt, Artificial
  Chemically Synthesized
uccacgugcgagggcguuaauac

SEQ ID NO: 986 - RNA, 23 nt, Artificial
  Chemically Synthesized
guccacgugcgagggcguuaaua

SEQ ID NO: 987 - RNA, 23 nt, Artificial
  Chemically Synthesized
uauaaaagcucagaugacauuuc

SEQ ID NO: 988 - RNA, 23 nt, Artificial
  Chemically Synthesized
uuauaaaagcucagaugacauuu

SEQ ID NO: 989 - RNA, 23 nt, Artificial
  Chemically Synthesized
auuauaaaagcucagaugacauu

SEQ ID NO: 990 - RNA, 23 nt, Artificial
  Chemically Synthesized
uauuauaaaagcucagaugacau

SEQ ID NO: 991 - RNA, 23 nt, Artificial
  Chemically Synthesized
guauuauaaaagcucagaugaca

SEQ ID NO: 992 - RNA, 23 nt, Artificial
  Chemically Synthesized
cucagaugacauuucguuuuuua

SEQ ID NO: 993 - RNA, 23 nt, Artificial
  Chemically Synthesized
gcucagaugacauuucguuuuuu

SEQ ID NO: 994 - RNA, 23 nt, Artificial
  Chemically Synthesized
agcucagaugacauuucguuuuu

SEQ ID NO: 995 - RNA, 23 nt, Artificial
  Chemically Synthesized
aagcucagaugacauuucguuuu

SEQ ID NO: 996 - RNA, 23 nt, Artificial
  Chemically Synthesized
aaagcucagaugacauuucguuu

SEQ ID NO: 997 - RNA, 23 nt, Artificial
  Chemically Synthesized
gccaaagauguuugaaaaugcuc

SEQ ID NO: 998 - RNA, 23 nt, Artificial
  Chemically Synthesized
ccucagcacuugcucaguaguuu

SEQ ID NO: 999 - RNA, 23 nt, Artificial
  Chemically Synthesized
cccucagcacuugcucaguaguu

SEQ ID NO: 1000 - RNA, 23 nt, Artificial
  Chemically Synthesized
acccucagcacuugcucaguagu

SEQ ID NO: 1001 - RNA, 23 nt, Artificial
  Chemically Synthesized
aacccucagcacuugcucaguag

SEQ ID NO: 1002 - RNA, 23 nt, Artificial
  Chemically Synthesized
aaacccucagcacuugcucagua

SEQ ID NO: 1003 - RNA, 23 nt, Artificial
  Chemically Synthesized
uucauauuggauugcgccuuugu

SEQ ID NO: 1004 - RNA, 23 nt, Artificial
  Chemically Synthesized
guucauauuggauugcgccuuug

SEQ ID NO: 1005 - RNA, 23 nt, Artificial
  Chemically Synthesized
uguucauauuggauugcgccuuu

SEQ ID NO: 1006 - RNA, 23 nt, Artificial
  Chemically Synthesized
ucuccuugguccuggaacagcgc

SEQ ID NO: 1007 - RNA, 23 nt, Artificial
  Chemically Synthesized
cucuccuugguccuggaacagcg

SEQ ID NO: 1008 - RNA, 23 nt, Artificial
  Chemically Synthesized
ucucuccuugguccuggaacagc

SEQ ID NO: 1009 - RNA, 23 nt, Artificial
  Chemically Synthesized
cucucuccuugguccuggaacag

SEQ ID NO: 1010 - RNA, 23 nt, Artificial
  Chemically Synthesized
ccucucuccuugguccuggaaca

SEQ ID NO: 1011 - RNA, 23 nt, Artificial
  Chemically Synthesized
ccaaagauguuugaaaaugcucu

SEQ ID NO: 1012 - RNA, 23 nt, Artificial
  Chemically Synthesized
uuucguuuuuuacacgagauuuc

SEQ ID NO: 1013 - RNA, 23 nt, Artificial
  Chemically Synthesized
auuucguuuuuuacacgagauuu

SEQ ID NO: 1014 - RNA, 23 nt, Artificial
  Chemically Synthesized
cauuucguuuuuuacacgagauu

SEQ ID NO: 1015 - RNA, 23 nt, Artificial
  Chemically Synthesized
acauuucguuuuuuacacgagau

SEQ ID NO: 1016 - RNA, 23 nt, Artificial
  Chemically Synthesized
gacauuucguuuuuuacacgaga

SEQ ID NO: 1017 - RNA, 23 nt, Artificial
  Chemically Synthesized
aacaggaacuugaauacugggag

SEQ ID NO: 1018 - RNA, 23 nt, Artificial
  Chemically Synthesized
gcuucagcgagugcaugaacgag

SEQ ID NO: 1019 - RNA, 23 nt, Artificial
  Chemically Synthesized
ggcuucagcgagugcaugaacga

SEQ ID NO: 1020 - RNA, 23 nt, Artificial
  Chemically Synthesized
cggcuucagcgagugcaugaacg

SEQ ID NO: 1021 - RNA, 23 nt, Artificial
  Chemically Synthesized
ccggcuucagcgagugcaugaac

SEQ ID NO: 1022 - RNA, 23 nt, Artificial
  Chemically Synthesized
gccggcuucagcgagugcaugaa

SEQ ID NO: 1023 - RNA, 23 nt, Artificial
  Chemically Synthesized
gaaaacacugauuuuggaugcuc

SEQ ID NO: 1024 - RNA, 23 nt, Artificial
  Chemically Synthesized
cagaugacauuucguuuuuuaca

SEQ ID NO: 1025 - RNA, 23 nt, Artificial
  Chemically Synthesized
ucagaugacauuucguuuuuuac

SEQ ID NO: 1026 - RNA, 23 nt, Artificial
  Chemically Synthesized
aaaagcucagaugacauuucguu

SEQ ID NO: 1027 - RNA, 23 nt, Artificial
  Chemically Synthesized
uaaaagcucagaugacauuucgu

SEQ ID NO: 1028 - RNA, 23 nt, Artificial
  Chemically Synthesized
gaauacugggagagaagaggacu

SEQ ID NO: 1029 - RNA, 23 nt, Artificial
  Chemically Synthesized
aaacaggaacuugaauacuggga

SEQ ID NO: 1030 - RNA, 23 nt, Artificial
  Chemically Synthesized
uaaacaggaacuugaauacuggg

SEQ ID NO: 1031 - RNA, 23 nt, Artificial
  Chemically Synthesized
cgauggccaguuugcuuuccuca

SEQ ID NO: 1032 - RNA, 23 nt, Artificial
  Chemically Synthesized
acugaucaccaaguagccacaaa

SEQ ID NO: 1033 - RNA, 23 nt, Artificial
  Chemically Synthesized
uacugaucaccaaguagccacaa

SEQ ID NO: 1034 - RNA, 23 nt, Artificial
  Chemically Synthesized
cuacugaucaccaaguagccaca

SEQ ID NO: 1035 - RNA, 23 nt, Artificial
  Chemically Synthesized
caaagacagcaucugagcacaga

SEQ ID NO: 1036 - RNA, 23 nt, Artificial
  Chemically Synthesized
ccaaagacagcaucugagcacag

SEQ ID NO: 1037 - RNA, 23 nt, Artificial
  Chemically Synthesized
accaaagacagcaucugagcaca

SEQ ID NO: 1038 - RNA, 23 nt, Artificial
  Chemically Synthesized
acaccggauaaaccaaagacagc

SEQ ID NO: 1039 - RNA, 23 nt, Artificial
  Chemically Synthesized
gacaccggauaaaccaaagacag

SEQ ID NO: 1040 - RNA, 23 nt, Artificial
  Chemically Synthesized
aagucucaaguaaaagagacaca

SEQ ID NO: 1041 - RNA, 23 nt, Artificial
  Chemically Synthesized
aaagucucaaguaaaagagacac

SEQ ID NO: 1042 - RNA, 23 nt, Artificial
  Chemically Synthesized
aacgcagugucaccuuccagcgg

SEQ ID NO: 1043 - RNA, 23 nt, Artificial
  Chemically Synthesized
caacgcagugucaccuuccagcg

SEQ ID NO: 1044 - RNA, 23 nt, Artificial
  Chemically Synthesized
ccaacgcagugucaccuuccagc

SEQ ID NO: 1045 - RNA, 23 nt, Artificial
  Chemically Synthesized
cccaacgcagugucaccuuccag

SEQ ID NO: 1046 - RNA, 23 nt, Artificial
  Chemically Synthesized
ccccaacgcagugucaccuucca

SEQ ID NO: 1047 - RNA, 23 nt, Artificial
  Chemically Synthesized
gacccagaucaaugccaugaccu

SEQ ID NO: 1048 - RNA, 23 nt, Artificial
  Chemically Synthesized
ugacccagaucaaugccaugacc

SEQ ID NO: 1049 - RNA, 23 nt, Artificial
  Chemically Synthesized
augacccagaucaaugccaugac

SEQ ID NO: 1050 - RNA, 23 nt, Artificial
  Chemically Synthesized
caugacccagaucaaugccauga

SEQ ID NO: 1051 - RNA, 23 nt, Artificial
  Chemically Synthesized
gcaugacccagaucaaugccaug

SEQ ID NO: 1052 - RNA, 23 nt, Artificial
  Chemically Synthesized
gagugcaugaacgaggugacccg

SEQ ID NO: 1053 - RNA, 23 nt, Artificial
  Chemically Synthesized
cgagugcaugaacgaggugaccc

SEQ ID NO: 1054 - RNA, 23 nt, Artificial
  Chemically Synthesized
gcgagugcaugaacgaggugacc

SEQ ID NO: 1055 - RNA, 23 nt, Artificial
  Chemically Synthesized
agcgagugcaugaacgaggugac

SEQ ID NO: 1056 - RNA, 23 nt, Artificial
  Chemically Synthesized
cagcgagugcaugaacgagguga

SEQ ID NO: 1057 - RNA, 23 nt, Artificial
  Chemically Synthesized
cuggagaaggcggacauucugga

SEQ ID NO: 1058 - RNA, 23 nt, Artificial
  Chemically Synthesized
cugaagaaagauagcucgcggca

SEQ ID NO: 1059 - RNA, 23 nt, Artificial
  Chemically Synthesized
gcacuugcucaguaguuuuguga

SEQ ID NO: 1060 - RNA, 23 nt, Artificial
  Chemically Synthesized
agcacuugcucaguaguuuugug

SEQ ID NO: 1061 - RNA, 23 nt, Artificial
  Chemically Synthesized
cagcacuugcucaguaguuuugu

SEQ ID NO: 1062 - RNA, 23 nt, Artificial
  Chemically Synthesized
ucagcacuugcucaguaguuuug

SEQ ID NO: 1063 - RNA, 23 nt, Artificial
  Chemically Synthesized
cucagcacuugcucaguaguuuu

SEQ ID NO: 1064 - RNA, 23 nt, Artificial
  Chemically Synthesized
auaaaagcucagaugacauuucg

SEQ ID NO: 1065 - RNA, 23 nt, Artificial
  Chemically Synthesized
aagaaguuacuuuuuguagagag

SEQ ID NO: 1066 - RNA, 23 nt, Artificial
  Chemically Synthesized
uaagaaguuacuuuuuguagaga

SEQ ID NO: 1067 - RNA, 23 nt, Artificial
  Chemically Synthesized
cuaagaaguuacuuuuuguagag

SEQ ID NO: 1068 - RNA, 23 nt, Artificial
  Chemically Synthesized
uucccuccggacucuaaacagga

SEQ ID NO: 1069 - RNA, 23 nt, Artificial
  Chemically Synthesized
gagccagcugaaaacacugauuu

SEQ ID NO: 1070 - RNA, 23 nt, Artificial
  Chemically Synthesized
ugagccagcugaaaacacugauu

SEQ ID NO: 1071 - RNA, 23 nt, Artificial
  Chemically Synthesized
cucaguaguuuugugaaagucuc

SEQ ID NO: 1072 - RNA, 23 nt, Artificial
  Chemically Synthesized
ugcaugacccagaucaaugccau

SEQ ID NO: 1073 - RNA, 23 nt, Artificial
  Chemically Synthesized
ucugaagaaagauagcucgcggc

SEQ ID NO: 1074 - RNA, 23 nt, Artificial
  Chemically Synthesized
cucugaagaaagauagcucgcgg

SEQ ID NO: 1075 - RNA, 23 nt, Artificial
  Chemically Synthesized
uucuuuuucgugaagaacuccaa

SEQ ID NO: 1076 - RNA, 23 nt, Artificial
  Chemically Synthesized
uuuaugugaugccaaagauguuu

SEQ ID NO: 1077 - RNA, 23 nt, Artificial
  Chemically Synthesized
uuuuaugugaugccaaagauguu

SEQ ID NO: 1078 - RNA, 23 nt, Artificial
  Chemically Synthesized
uuuuuaugugaugccaaagaugu

SEQ ID NO: 1079 - RNA, 23 nt, Artificial
  Chemically Synthesized
uuuuuuaugugaugccaaagaug

SEQ ID NO: 1080 - RNA, 23 nt, Artificial
  Chemically Synthesized
cgccuuuguauuauaaaagcuca

SEQ ID NO: 1081 - RNA, 23 nt, Artificial
  Chemically Synthesized
uaauaaacccucagcacuugcuc

SEQ ID NO: 1082 - RNA, 23 nt, Artificial
  Chemically Synthesized
auaauaaacccucagcacuugcu

SEQ ID NO: 1083 - RNA, 23 nt, Artificial
  Chemically Synthesized
uauaauaaacccucagcacuugc

SEQ ID NO: 1084 - RNA, 23 nt, Artificial
  Chemically Synthesized
auauaauaaacccucagcacuug

SEQ ID NO: 1085 - RNA, 23 nt, Artificial
  Chemically Synthesized
aauauaauaaacccucagcacuu

SEQ ID NO: 1086 - RNA, 23 nt, Artificial
  Chemically Synthesized
aaauauaauaaacccucagcacu

SEQ ID NO: 1087 - RNA, 23 nt, Artificial
  Chemically Synthesized
aaaauauaauaaacccucagcac

SEQ ID NO: 1088 - RNA, 23 nt, Artificial
  Chemically Synthesized
caaaauauaauaaacccucagca

SEQ ID NO: 1089 - RNA, 23 nt, Artificial
  Chemically Synthesized
agaggcggcuaagguguuuggag

SEQ ID NO: 1090 - RNA, 23 nt, Artificial
  Chemically Synthesized
gagaggcggcuaagguguuugga

SEQ ID NO: 1091 - RNA, 23 nt, Artificial
  Chemically Synthesized
ggagaggcggcuaagguguuugg

SEQ ID NO: 1092 - RNA, 23 nt, Artificial
  Chemically Synthesized
uggagaggcggcuaagguguuug

SEQ ID NO: 1093 - RNA, 23 nt, Artificial
  Chemically Synthesized
cuggagaggcggcuaagguguuu

SEQ ID NO: 1094 - RNA, 23 nt, Artificial
  Chemically Synthesized
gcuggagaaggcggacauucugg

SEQ ID NO: 1095 - RNA, 23 nt, Artificial
  Chemically Synthesized
agcuggagaaggcggacauucug

SEQ ID NO: 1096 - RNA, 23 nt, Artificial
  Chemically Synthesized
aagcuggagaaggcggacauucu

SEQ ID NO: 1097 - RNA, 23 nt, Artificial
  Chemically Synthesized
uuaugugaugccaaagauguuug

SEQ ID NO: 1098 - RNA, 23 nt, Artificial
  Chemically Synthesized
ucagcgagugcaugaacgaggug

SEQ ID NO: 1099 - RNA, 23 nt, Artificial
  Chemically Synthesized
uucagcgagugcaugaacgaggu

SEQ ID NO: 1100 - RNA, 23 nt, Artificial
  Chemically Synthesized
cuucagcgagugcaugaacgagg

SEQ ID NO: 1101 - RNA, 23 nt, Artificial
  Chemically Synthesized
agccagugucaacacgacaccgg

SEQ ID NO: 1102 - RNA, 23 nt, Artificial
  Chemically Synthesized
cagccagugucaacacgacaccg

SEQ ID NO: 1103 - RNA, 23 nt, Artificial
  Chemically Synthesized
ccagccagugucaacacgacacc

SEQ ID NO: 1104 - RNA, 23 nt, Artificial
  Chemically Synthesized
cccagccagugucaacacgacac

SEQ ID NO: 1105 - RNA, 23 nt, Artificial
  Chemically Synthesized
ccccagccagugucaacacgaca

SEQ ID NO: 1106 - RNA, 23 nt, Artificial
  Chemically Synthesized
cuaagguguuuggaggcuuccag

SEQ ID NO: 1107 - RNA, 23 nt, Artificial
  Chemically Synthesized
gcuaagguguuuggaggcuucca

SEQ ID NO: 1108 - RNA, 23 nt, Artificial
  Chemically Synthesized
ggcuaagguguuuggaggcuucc

SEQ ID NO: 1109 - RNA, 23 nt, Artificial
  Chemically Synthesized
cggcuaagguguuuggaggcuuc

SEQ ID NO: 1110 - RNA, 23 nt, Artificial
  Chemically Synthesized
gcggcuaagguguuuggaggcuu

SEQ ID NO: 1111 - RNA, 23 nt, Artificial
  Chemically Synthesized
agugcaugaacgaggugacccgc

SEQ ID NO: 1112 - RNA, 23 nt, Artificial
  Chemically Synthesized
aaaugacagugaagcaccuccgg

SEQ ID NO: 1113 - RNA, 23 nt, Artificial
  Chemically Synthesized
gaaaugacagugaagcaccuccg

SEQ ID NO: 1114 - RNA, 23 nt, Artificial
  Chemically Synthesized
ggaaaugacagugaagcaccucc

SEQ ID NO: 1115 - RNA, 23 nt, Artificial
  Chemically Synthesized
gauuucuuuuuuaugugaugcca

SEQ ID NO: 1116 - RNA, 23 nt, Artificial
  Chemically Synthesized
auuaagugguuacuuuguguuuu

SEQ ID NO: 1117 - RNA, 23 nt, Artificial
  Chemically Synthesized
agguguuuggaggcuuccaggug

SEQ ID NO: 1118 - RNA, 23 nt, Artificial
  Chemically Synthesized
aagguguuuggaggcuuccaggu

SEQ ID NO: 1119 - RNA, 23 nt, Artificial
  Chemically Synthesized
uaagguguuuggaggcuuccagg

SEQ ID NO: 1120 - RNA, 23 nt, Artificial
  Chemically Synthesized
cugagccagcugaaaacacugau

SEQ ID NO: 1121 - RNA, 23 nt, Artificial
  Chemically Synthesized
ucugagccagcugaaaacacuga

SEQ ID NO: 1122 - RNA, 23 nt, Artificial
  Chemically Synthesized
gucugagccagcugaaaacacug

SEQ ID NO: 1123 - RNA, 23 nt, Artificial
  Chemically Synthesized
gcucuuaaaauaucuuccuuugg

SEQ ID NO: 1124 - RNA, 23 nt, Artificial
  Chemically Synthesized
ugcucuuaaaauaucuuccuuug

SEQ ID NO: 1125 - RNA, 23 nt, Artificial
  Chemically Synthesized
augcucuuaaaauaucuuccuuu

SEQ ID NO: 1126 - RNA, 23 nt, Artificial
  Chemically Synthesized
aaugcucuuaaaauaucuuccuu

SEQ ID NO: 1127 - RNA, 23 nt, Artificial
  Chemically Synthesized
aaaugcucuuaaaauaucuuccu

SEQ ID NO: 1128 - RNA, 23 nt, Artificial
  Chemically Synthesized
ccgauggccaguuugcuuuccuc

SEQ ID NO: 1129 - RNA, 23 nt, Artificial
  Chemically Synthesized
cccgauggccaguuugcuuuccu

SEQ ID NO: 1130 - RNA, 23 nt, Artificial
  Chemically Synthesized
ucccgauggccaguuugcuuucc

SEQ ID NO: 1131 - RNA, 23 nt, Artificial
  Chemically Synthesized
cucccgauggccaguuugcuuuc

SEQ ID NO: 1132 - RNA, 23 nt, Artificial
  Chemically Synthesized
gcucccgauggccaguuugcuuu

SEQ ID NO: 1133 - RNA, 23 nt, Artificial
  Chemically Synthesized
guuaauaccgaggugcgcacucg

SEQ ID NO: 1134 - RNA, 23 nt, Artificial
  Chemically Synthesized
cguuaauaccgaggugcgcacuc

SEQ ID NO: 1135 - RNA, 23 nt, Artificial
  Chemically Synthesized
gcguuaauaccgaggugcgcacu

SEQ ID NO: 1136 - RNA, 23 nt, Artificial
  Chemically Synthesized
ggcguuaauaccgaggugcgcac

SEQ ID NO: 1137 - RNA, 23 nt, Artificial
  Chemically Synthesized
gggcguuaauaccgaggugcgca

SEQ ID NO: 1138 - RNA, 23 nt, Artificial
  Chemically Synthesized
gauuaagugguuacuuuguguuu

SEQ ID NO: 1139 - RNA, 23 nt, Artificial
  Chemically Synthesized
uaaaugaaagucugagccagcug

SEQ ID NO: 1140 - RNA, 23 nt, Artificial
  Chemically Synthesized
auaaaugaaagucugagccagcu

SEQ ID NO: 1141 - RNA, 23 nt, Artificial
  Chemically Synthesized
aauaaaugaaagucugagccagc

SEQ ID NO: 1142 - RNA, 23 nt, Artificial
  Chemically Synthesized
gaauaaaugaaagucugagccag

SEQ ID NO: 1143 - RNA, 23 nt, Artificial
  Chemically Synthesized
agaauaaaugaaagucugagcca

SEQ ID NO: 1144 - RNA, 23 nt, Artificial
  Chemically Synthesized
aagaauaaaugaaagucugagcc

SEQ ID NO: 1145 - RNA, 23 nt, Artificial
  Chemically Synthesized
caagaauaaaugaaagucugagc

SEQ ID NO: 1146 - RNA, 23 nt, Artificial
  Chemically Synthesized
gcaagaauaaaugaaagucugag

SEQ ID NO: 1147 - RNA, 23 nt, Artificial
  Chemically Synthesized
caucugagcacagaaagucauca

SEQ ID NO: 1148 - RNA, 23 nt, Artificial
  Chemically Synthesized
ugacauuucguuuuuuacacgag

SEQ ID NO: 1149 - RNA, 23 nt, Artificial
  Chemically Synthesized
augacauuucguuuuuuacacga

SEQ ID NO: 1150 - RNA, 23 nt, Artificial
  Chemically Synthesized
gaugacauuucguuuuuuacacg

SEQ ID NO: 1151 - RNA, 23 nt, Artificial
  Chemically Synthesized
agaugacauuucguuuuuuacac

SEQ ID NO: 1152 - RNA, 23 nt, Artificial
  Chemically Synthesized
cagugucaacacgacaccggaua

SEQ ID NO: 1153 - RNA, 23 nt, Artificial
  Chemically Synthesized
ccagugucaacacgacaccggau

SEQ ID NO: 1154 - RNA, 23 nt, Artificial
  Chemically Synthesized
cguuuuuuacacgagauuucuuu

SEQ ID NO: 1155 - RNA, 23 nt, Artificial
  Chemically Synthesized
ucguuuuuuacacgagauuucuu

SEQ ID NO: 1156 - RNA, 23 nt, Artificial
  Chemically Synthesized
uucguuuuuuacacgagauuucu

SEQ ID NO: 1157 - RNA, 23 nt, Artificial
  Chemically Synthesized
auguucauauuggauugcgccuu

SEQ ID NO: 1158 - RNA, 23 nt, Artificial
  Chemically Synthesized
uauguucauauuggauugcgccu

SEQ ID NO: 1159 - RNA, 23 nt, Artificial
  Chemically Synthesized
auauguucauauuggauugcgcc

SEQ ID NO: 1160 - RNA, 23 nt, Artificial
  Chemically Synthesized
uauauguucauauuggauugcgc

SEQ ID NO: 1161 - RNA, 23 nt, Artificial
  Chemically Synthesized
ugauuaagugguuacuuuguguu

SEQ ID NO: 1162 - RNA, 23 nt, Artificial
  Chemically Synthesized
uugauuaagugguuacuuugugu

SEQ ID NO: 1163 - RNA, 23 nt, Artificial
  Chemically Synthesized
uuugauuaagugguuacuuugug

SEQ ID NO: 1164 - RNA, 23 nt, Artificial
  Chemically Synthesized
uuuugauuaagugguuacuuugu

SEQ ID NO: 1165 - RNA, 23 nt, Artificial
  Chemically Synthesized
uuuuugauuaagugguuacuuug

SEQ ID NO: 1166 - RNA, 23 nt, Artificial
  Chemically Synthesized
gcuacugaucaccaaguagccac

SEQ ID NO: 1167 - RNA, 23 nt, Artificial
  Chemically Synthesized
gugcugauaacagcggaaucccc

SEQ ID NO: 1168 - RNA, 23 nt, Artificial
  Chemically Synthesized
auucuuuuucgugaagaacucca

SEQ ID NO: 1169 - RNA, 23 nt, Artificial
  Chemically Synthesized
aauucuuuuucgugaagaacucc

SEQ ID NO: 1170 - RNA, 23 nt, Artificial
  Chemically Synthesized
aaauucuuuuucgugaagaacuc

SEQ ID NO: 1171 - RNA, 23 nt, Artificial
  Chemically Synthesized
uguuuggaggcuuccagguggua

SEQ ID NO: 1172 - RNA, 23 nt, Artificial
  Chemically Synthesized
guguuuggaggcuuccagguggu

SEQ ID NO: 1173 - RNA, 23 nt, Artificial
  Chemically Synthesized
gguguuuggaggcuuccaggugg

SEQ ID NO: 1174 - RNA, 23 nt, Artificial
  Chemically Synthesized
uuacuuuuuguagagagagcugu

SEQ ID NO: 1175 - RNA, 23 nt, Artificial
  Chemically Synthesized
gcucugaagaaagauagcucgcg

SEQ ID NO: 1176 - RNA, 23 nt, Artificial
  Chemically Synthesized
ugcucugaagaaagauagcucgc

SEQ ID NO: 1177 - RNA, 23 nt, Artificial
  Chemically Synthesized
augcucugaagaaagauagcucg

SEQ ID NO: 1178 - RNA, 23 nt, Artificial
  Chemically Synthesized
guuuuuuacacgagauuucuuuu

SEQ ID NO: 1179 - RNA, 23 nt, Artificial
  Chemically Synthesized
uaaacccucagcacuugcucagu

SEQ ID NO: 1180 - RNA, 23 nt, Artificial
  Chemically Synthesized
aauaaacccucagcacuugcuca

SEQ ID NO: 1181 - RNA, 23 nt, Artificial
  Chemically Synthesized
uguauuauaaaagcucagaugac

SEQ ID NO: 1182 - RNA, 23 nt, Artificial
  Chemically Synthesized
ugcuuuccucauucccaacgggg

SEQ ID NO: 1183 - RNA, 23 nt, Artificial
  Chemically Synthesized
gacuuuuuugauuaagugguuac

SEQ ID NO: 1184 - RNA, 23 nt, Artificial
  Chemically Synthesized
ggcggcuaagguguuuggaggcu

SEQ ID NO: 1185 - RNA, 23 nt, Artificial
  Chemically Synthesized
agggcguuaauaccgaggugcgc

SEQ ID NO: 1186 - RNA, 23 nt, Artificial
  Chemically Synthesized
gagggcguuaauaccgaggugcg

SEQ ID NO: 1187 - RNA, 23 nt, Artificial
  Chemically Synthesized
cgagggcguuaauaccgaggugc

SEQ ID NO: 1188 - RNA, 23 nt, Artificial
  Chemically Synthesized
gcgagggcguuaauaccgaggug

SEQ ID NO: 1189 - RNA, 23 nt, Artificial
  Chemically Synthesized
ugcgagggcguuaauaccgaggu

SEQ ID NO: 1190 - RNA, 23 nt, Artificial
  Chemically Synthesized
ugagcacagacccaagugugcug

SEQ ID NO: 1191 - RNA, 23 nt, Artificial
  Chemically Synthesized
cugagcacagacccaagugugcu

SEQ ID NO: 1192 - RNA, 23 nt, Artificial
  Chemically Synthesized
gcugagcacagacccaagugugc

SEQ ID NO: 1193 - RNA, 23 nt, Artificial
  Chemically Synthesized
cgcugagcacagacccaagugug

SEQ ID NO: 1194 - RNA, 23 nt, Artificial
  Chemically Synthesized
gcgcugagcacagacccaagugu

SEQ ID NO: 1195 - RNA, 23 nt, Artificial
  Chemically Synthesized
ggagaaaaauuccucguccccgg

SEQ ID NO: 1196 - RNA, 23 nt, Artificial
  Chemically Synthesized
uggagaaaaauuccucguccccg

SEQ ID NO: 1197 - RNA, 23 nt, Artificial
  Chemically Synthesized
auggagaaaaauuccucgucccc

SEQ ID NO: 1198 - RNA, 23 nt, Artificial
  Chemically Synthesized
aauggagaaaaauuccucguccc

SEQ ID NO: 1199 - RNA, 23 nt, Artificial
  Chemically Synthesized
uaauggagaaaaauuccucgucc

SEQ ID NO: 1200 - RNA, 23 nt, Artificial
  Chemically Synthesized
gcauuccaagcuggagaaggcgg

SEQ ID NO: 1201 - RNA, 23 nt, Artificial
  Chemically Synthesized
gccuuuguauuauaaaagcucag

SEQ ID NO: 1202 - RNA, 23 nt, Artificial
  Chemically Synthesized
accucucuccuugguccuggaac

SEQ ID NO: 1203 - RNA, 23 nt, Artificial
  Chemically Synthesized
uaccucucuccuugguccuggaa

SEQ ID NO: 1204 - RNA, 23 nt, Artificial
  Chemically Synthesized
gaucaaugccaugaccuaccccg

SEQ ID NO: 1205 - RNA, 23 nt, Artificial
  Chemically Synthesized
agcaagaauaaaugaaagucuga

SEQ ID NO: 1206 - RNA, 23 nt, Artificial
  Chemically Synthesized
ugcugauaacagcggaauccccc

SEQ ID NO: 1207 - RNA, 23 nt, Artificial
  Chemically Synthesized
gagaaaaauuccucguccccggu

SEQ ID NO: 1208 - RNA, 23 nt, Artificial
  Chemically Synthesized
uaaaauaucuuccuuuggggaag

SEQ ID NO: 1209 - RNA, 23 nt, Artificial
  Chemically Synthesized
uuaaaauaucuuccuuuggggaa

SEQ ID NO: 1210 - RNA, 23 nt, Artificial
  Chemically Synthesized
cuuaaaauaucuuccuuugggga

SEQ ID NO: 1211 - RNA, 23 nt, Artificial
  Chemically Synthesized
ucuuaaaauaucuuccuuugggg

SEQ ID NO: 1212 - RNA, 23 nt, Artificial
  Chemically Synthesized
cucuuaaaauaucuuccuuuggg

SEQ ID NO: 1213 - RNA, 23 nt, Artificial
  Chemically Synthesized
cauuccaagcuggagaaggcgga

SEQ ID NO: 1214 - RNA, 23 nt, Artificial
  Chemically Synthesized
auaauggagaaaaauuccucguc

SEQ ID NO: 1215 - RNA, 23 nt, Artificial
  Chemically Synthesized
uauaauggagaaaaauuccucgu

SEQ ID NO: 1216 - RNA, 23 nt, Artificial
  Chemically Synthesized
gucuaccucucuccuugguccug

SEQ ID NO: 1217 - RNA, 23 nt, Artificial
  Chemically Synthesized
cgucuaccucucuccuugguccu

SEQ ID NO: 1218 - RNA, 23 nt, Artificial
  Chemically Synthesized
ccgucuaccucucuccuuggucc

SEQ ID NO: 1219 - RNA, 23 nt, Artificial
  Chemically Synthesized
cccgucuaccucucuccuugguc

SEQ ID NO: 1220 - RNA, 23 nt, Artificial
  Chemically Synthesized
ccccgucuaccucucuccuuggu

SEQ ID NO: 1221 - RNA, 23 nt, Artificial
  Chemically Synthesized
aaaaugcucuuaaaauaucuucc

SEQ ID NO: 1222 - RNA, 23 nt, Artificial
  Chemically Synthesized
ucaaugccaugaccuaccccggg

SEQ ID NO: 1223 - RNA, 23 nt, Artificial
  Chemically Synthesized
aucaaugccaugaccuaccccgg

SEQ ID NO: 1224 - RNA, 23 nt, Artificial
  Chemically Synthesized
auuccaagcuggagaaggcggac

SEQ ID NO: 1225 - RNA, 23 nt, Artificial
  Chemically Synthesized
auauaauggagaaaaauuccucg

SEQ ID NO: 1226 - RNA, 23 nt, Artificial
  Chemically Synthesized
aaaauucuuuuucgugaagaacu

SEQ ID NO: 1227 - RNA, 23 nt, Artificial
  Chemically Synthesized
acaaaauauaauaaacccucagc

SEQ ID NO: 1228 - RNA, 23 nt, Artificial
  Chemically Synthesized
cuuuccucauucccaacggggcc

SEQ ID NO: 1229 - RNA, 23 nt, Artificial
  Chemically Synthesized
gcuuuccucauucccaacggggc

SEQ ID NO: 1230 - RNA, 23 nt, Artificial
  Chemically Synthesized
gauauaauggagaaaaauuccuc

SEQ ID NO: 1231 - RNA, 23 nt, Artificial
  Chemically Synthesized
gcugauaacagcggaaucccccg

SEQ ID NO: 1232 - RNA, 23 nt, Artificial
  Chemically Synthesized
uuaauaccgaggugcgcacucgg

SEQ ID NO: 1233 - RNA, 23 nt, Artificial
  Chemically Synthesized
cugauaacagcggaaucccccgu

SEQ ID NO: 1234 - RNA, 23 nt, Artificial
  Chemically Synthesized
uaauaccgaggugcgcacucggc

SEQ ID NO: 1235 - RNA, 23 nt, Artificial
  Chemically Synthesized
aaaaauucuuuuucgugaagaac

SEQ ID NO: 1236 - RNA, 23 nt, Artificial
  Chemically Synthesized
uuuccucauucccaacggggccu

SEQ ID NO: 1237 - RNA, 23 nt, Artificial
  Chemically Synthesized
cuaccucucuccuugguccugga

SEQ ID NO: 1238 - RNA, 23 nt, Artificial
  Chemically Synthesized
ucuaccucucuccuugguccugg

SEQ ID NO: 1239 - RNA, 23 nt, Artificial
  Chemically Synthesized
uuauauguucauauuggauugcg

SEQ ID NO: 1240 - RNA, 23 nt, Artificial
  Chemically Synthesized
augacagugaagcaccuccggaa

SEQ ID NO: 1241 - RNA, 23 nt, Artificial
  Chemically Synthesized
aaugacagugaagcaccuccgga

SEQ ID NO: 1242 - RNA, 23 nt, Artificial
  Chemically Synthesized
agauuucuuuuuuaugugaugcc

SEQ ID NO: 1243 - RNA, 23 nt, Artificial
  Chemically Synthesized
uuuauauguucauauuggauugc

SEQ ID NO: 1244 - RNA, 23 nt, Artificial
  Chemically Synthesized
gcuucacugucauuuccagaaug

SEQ ID NO: 1245 - RNA, 23 nt, Artificial
  Chemically Synthesized
cuucacugucauuuccagaaugu

SEQ ID NO: 1246 - RNA, 23 nt, Artificial
  Chemically Synthesized
uucacugucauuuccagaauguc

SEQ ID NO: 1247 - RNA, 23 nt, Artificial
  Chemically Synthesized
ucagagcauccaaaaucaguguu

SEQ ID NO: 1248 - RNA, 23 nt, Artificial
  Chemically Synthesized
cagagcauccaaaaucaguguuu

SEQ ID NO: 1249 - RNA, 23 nt, Artificial
  Chemically Synthesized
agagcauccaaaaucaguguuuu

SEQ ID NO: 1250 - RNA, 23 nt, Artificial
  Chemically Synthesized
gugcauggucagucacuuaauac

SEQ ID NO: 1251 - RNA, 23 nt, Artificial
  Chemically Synthesized
ugcauggucagucacuuaauaca

SEQ ID NO: 1252 - RNA, 23 nt, Artificial
  Chemically Synthesized
gcauggucagucacuuaauacag

SEQ ID NO: 1253 - RNA, 23 nt, Artificial
  Chemically Synthesized
cauggucagucacuuaauacagc

SEQ ID NO: 1254 - RNA, 23 nt, Artificial
  Chemically Synthesized
auggucagucacuuaauacagcu

SEQ ID NO: 1255 - RNA, 23 nt, Artificial
  Chemically Synthesized
gaugacuuucugugcucagaugc

SEQ ID NO: 1256 - RNA, 23 nt, Artificial
  Chemically Synthesized
augacuuucugugcucagaugcu

SEQ ID NO: 1257 - RNA, 23 nt, Artificial
  Chemically Synthesized
uucugugcucagaugcugucuuu

SEQ ID NO: 1258 - RNA, 23 nt, Artificial
  Chemically Synthesized
auuuuauuuuuggaguucuucac

SEQ ID NO: 1259 - RNA, 23 nt, Artificial
  Chemically Synthesized
uuuuggaguucuucacgaaaaag

SEQ ID NO: 1260 - RNA, 23 nt, Artificial
  Chemically Synthesized
uuuggaguucuucacgaaaaaga

SEQ ID NO: 1261 - RNA, 23 nt, Artificial
  Chemically Synthesized
gggguaggucauggcauugaucu

SEQ ID NO: 1262 - RNA, 23 nt, Artificial
  Chemically Synthesized
ggguaggucauggcauugaucug

SEQ ID NO: 1263 - RNA, 23 nt, Artificial
  Chemically Synthesized
gguaggucauggcauugaucugg

SEQ ID NO: 1264 - RNA, 23 nt, Artificial
  Chemically Synthesized
guaggucauggcauugaucuggg

SEQ ID NO: 1265 - RNA, 23 nt, Artificial
  Chemically Synthesized
uaggucauggcauugaucugggu

SEQ ID NO: 1266 - RNA, 23 nt, Artificial
  Chemically Synthesized
cagcuuggaaugccgcgagcuau

SEQ ID NO: 1267 - RNA, 23 nt, Artificial
  Chemically Synthesized
agcuuggaaugccgcgagcuauc

SEQ ID NO: 1268 - RNA, 23 nt, Artificial
  Chemically Synthesized
gcuuggaaugccgcgagcuaucu

SEQ ID NO: 1269 - RNA, 23 nt, Artificial
  Chemically Synthesized
cuuggaaugccgcgagcuaucuu

SEQ ID NO: 1270 - RNA, 23 nt, Artificial
  Chemically Synthesized
uuggaaugccgcgagcuaucuuu

SEQ ID NO: 1271 - RNA, 23 nt, Artificial
  Chemically Synthesized
uggcuacuuggugaucaguagcg

SEQ ID NO: 1272 - RNA, 23 nt, Artificial
  Chemically Synthesized
ggcuacuuggugaucaguagcgc

SEQ ID NO: 1273 - RNA, 23 nt, Artificial
  Chemically Synthesized
gcuacuuggugaucaguagcgcu

SEQ ID NO: 1274 - RNA, 23 nt, Artificial
  Chemically Synthesized
uuucagcuggcucagacuuucau

SEQ ID NO: 1275 - RNA, 23 nt, Artificial
  Chemically Synthesized
uucagcuggcucagacuuucauu

SEQ ID NO: 1276 - RNA, 23 nt, Artificial
  Chemically Synthesized
ucagcuggcucagacuuucauuu

SEQ ID NO: 1277 - RNA, 23 nt, Artificial
  Chemically Synthesized
gaggugcuucacugucauuucca

SEQ ID NO: 1278 - RNA, 23 nt, Artificial
  Chemically Synthesized
aggugcuucacugucauuuccag

SEQ ID NO: 1279 - RNA, 23 nt, Artificial
  Chemically Synthesized
ggugcuucacugucauuuccaga

SEQ ID NO: 1280 - RNA, 23 nt, Artificial
  Chemically Synthesized
ucaaguuccuguuuagaguccgg

SEQ ID NO: 1281 - RNA, 23 nt, Artificial
  Chemically Synthesized
ugggaaugaggaaagcaaacugg

SEQ ID NO: 1282 - RNA, 23 nt, Artificial
  Chemically Synthesized
uccgcuguuaucagcaccagcuc

SEQ ID NO: 1283 - RNA, 23 nt, Artificial
  Chemically Synthesized
uggugaucaguagcgcuguucca

SEQ ID NO: 1284 - RNA, 23 nt, Artificial
  Chemically Synthesized
auauauacaaauauagugcaugg

SEQ ID NO: 1285 - RNA, 23 nt, Artificial
  Chemically Synthesized
uauauacaaauauagugcauggu

SEQ ID NO: 1286 - RNA, 23 nt, Artificial
  Chemically Synthesized
auauacaaauauagugcaugguc

SEQ ID NO: 1287 - RNA, 23 nt, Artificial
  Chemically Synthesized
uauacaaauauagugcaugguca

SEQ ID NO: 1288 - RNA, 23 nt, Artificial
  Chemically Synthesized
auacaaauauagugcauggucag

SEQ ID NO: 1289 - RNA, 23 nt, Artificial
  Chemically Synthesized
ccaaaaucaguguuuucagcugg

SEQ ID NO: 1290 - RNA, 23 nt, Artificial
  Chemically Synthesized
caaaaucaguguuuucagcuggc

SEQ ID NO: 1291 - RNA, 23 nt, Artificial
  Chemically Synthesized
aaaaucaguguuuucagcuggcu

SEQ ID NO: 1292 - RNA, 23 nt, Artificial
  Chemically Synthesized
uuucaaacaucuuuggcaucaca

SEQ ID NO: 1293 - RNA, 23 nt, Artificial
  Chemically Synthesized
uucaaacaucuuuggcaucacau

SEQ ID NO: 1294 - RNA, 23 nt, Artificial
  Chemically Synthesized
ucaaacaucuuuggcaucacaua

SEQ ID NO: 1295 - RNA, 23 nt, Artificial
  Chemically Synthesized
aauacagcucucucuacaaaaag

SEQ ID NO: 1296 - RNA, 23 nt, Artificial
  Chemically Synthesized
auacagcucucucuacaaaaagu

SEQ ID NO: 1297 - RNA, 23 nt, Artificial
  Chemically Synthesized
uacagcucucucuacaaaaagua

SEQ ID NO: 1298 - RNA, 23 nt, Artificial
  Chemically Synthesized
uggaaugccgcgagcuaucuuuc

SEQ ID NO: 1299 - RNA, 23 nt, Artificial
  Chemically Synthesized
ggaaugccgcgagcuaucuuucu

SEQ ID NO: 1300 - RNA, 23 nt, Artificial
  Chemically Synthesized
gaaugccgcgagcuaucuuucuu

SEQ ID NO: 1301 - RNA, 23 nt, Artificial
  Chemically Synthesized
aaugccgcgagcuaucuuucuuc

SEQ ID NO: 1302 - RNA, 23 nt, Artificial
  Chemically Synthesized
augccgcgagcuaucuuucuuca

SEQ ID NO: 1303 - RNA, 23 nt, Artificial
  Chemically Synthesized
uggucagucacuuaauacagcuc

SEQ ID NO: 1304 - RNA, 23 nt, Artificial
  Chemically Synthesized
ggucagucacuuaauacagcucu

SEQ ID NO: 1305 - RNA, 23 nt, Artificial
  Chemically Synthesized
gucagucacuuaauacagcucuc

SEQ ID NO: 1306 - RNA, 23 nt, Artificial
  Chemically Synthesized
ucagucacuuaauacagcucucu

SEQ ID NO: 1307 - RNA, 23 nt, Artificial
  Chemically Synthesized
agucacuuaauacagcucucucu

SEQ ID NO: 1308 - RNA, 23 nt, Artificial
  Chemically Synthesized
gucacuuaauacagcucucucua

SEQ ID NO: 1309 - RNA, 23 nt, Artificial
  Chemically Synthesized
ccauaauaggcuuugaugacuuu

SEQ ID NO: 1310 - RNA, 23 nt, Artificial
  Chemically Synthesized
ugucucuuuuacuugagacuuuc

SEQ ID NO: 1311 - RNA, 23 nt, Artificial
  Chemically Synthesized
gucucuuuuacuugagacuuuca

SEQ ID NO: 1312 - RNA, 23 nt, Artificial
  Chemically Synthesized
uacuugagacuuucacaaaacua

SEQ ID NO: 1313 - RNA, 23 nt, Artificial
  Chemically Synthesized
acuugagacuuucacaaaacuac

SEQ ID NO: 1314 - RNA, 23 nt, Artificial
  Chemically Synthesized
cuugagacuuucacaaaacuacu

SEQ ID NO: 1315 - RNA, 23 nt, Artificial
  Chemically Synthesized
uugagacuuucacaaaacuacug

SEQ ID NO: 1316 - RNA, 23 nt, Artificial
  Chemically Synthesized
cagucacuuaauacagcucucuc

SEQ ID NO: 1317 - RNA, 23 nt, Artificial
  Chemically Synthesized
acuuaaucaaaaaaguccucuuc

SEQ ID NO: 1318 - RNA, 23 nt, Artificial
  Chemically Synthesized
caaguuccuguuuagaguccgga

SEQ ID NO: 1319 - RNA, 23 nt, Artificial
  Chemically Synthesized
aaguuccuguuuagaguccggag

SEQ ID NO: 1320 - RNA, 23 nt, Artificial
  Chemically Synthesized
aguuccuguuuagaguccggagg

SEQ ID NO: 1321 - RNA, 23 nt, Artificial
  Chemically Synthesized
guuccuguuuagaguccggaggg

SEQ ID NO: 1322 - RNA, 23 nt, Artificial
  Chemically Synthesized
uuccuguuuagaguccggaggga

SEQ ID NO: 1323 - RNA, 23 nt, Artificial
  Chemically Synthesized
uggcauugaucugggucaugcag

SEQ ID NO: 1324 - RNA, 23 nt, Artificial
  Chemically Synthesized
gcucuucgucuuuucuccauaau

SEQ ID NO: 1325 - RNA, 23 nt, Artificial
  Chemically Synthesized
cucuucgucuuuucuccauaaua

SEQ ID NO: 1326 - RNA, 23 nt, Artificial
  Chemically Synthesized
ucuucgucuuuucuccauaauag

SEQ ID NO: 1327 - RNA, 23 nt, Artificial
  Chemically Synthesized
cuucgucuuuucuccauaauagg

SEQ ID NO: 1328 - RNA, 23 nt, Artificial
  Chemically Synthesized
aauacaaaggcgcaauccaauau

SEQ ID NO: 1329 - RNA, 23 nt, Artificial
  Chemically Synthesized
auacaaaggcgcaauccaauaug

SEQ ID NO: 1330 - RNA, 23 nt, Artificial
  Chemically Synthesized
uacaaaggcgcaauccaauauga

SEQ ID NO: 1331 - RNA, 23 nt, Artificial
  Chemically Synthesized
uauagugcauggucagucacuua

SEQ ID NO: 1332 - RNA, 23 nt, Artificial
  Chemically Synthesized
auagugcauggucagucacuuaa

SEQ ID NO: 1333 - RNA, 23 nt, Artificial
  Chemically Synthesized
uagugcauggucagucacuuaau

SEQ ID NO: 1334 - RNA, 23 nt, Artificial
  Chemically Synthesized
agugcauggucagucacuuaaua

SEQ ID NO: 1335 - RNA, 23 nt, Artificial
  Chemically Synthesized
aaccacuuaaucaaaaaaguccu

SEQ ID NO: 1336 - RNA, 23 nt, Artificial
  Chemically Synthesized
accacuuaaucaaaaaaguccuc

SEQ ID NO: 1337 - RNA, 23 nt, Artificial
  Chemically Synthesized
ccacuuaaucaaaaaaguccucu

SEQ ID NO: 1338 - RNA, 23 nt, Artificial
  Chemically Synthesized
cacuuaaucaaaaaaguccucuu

SEQ ID NO: 1339 - RNA, 23 nt, Artificial
  Chemically Synthesized
uuagaguccggagggaagagagg

SEQ ID NO: 1340 - RNA, 23 nt, Artificial
  Chemically Synthesized
gugcucagaugcugucuuugguu

SEQ ID NO: 1341 - RNA, 23 nt, Artificial
  Chemically Synthesized
ugcucagaugcugucuuugguuu

SEQ ID NO: 1342 - RNA, 23 nt, Artificial
  Chemically Synthesized
gcucagaugcugucuuugguuua

SEQ ID NO: 1343 - RNA, 23 nt, Artificial
  Chemically Synthesized
cucagaugcugucuuugguuuau

SEQ ID NO: 1344 - RNA, 23 nt, Artificial
  Chemically Synthesized
ucagaugcugucuuugguuuauc

SEQ ID NO: 1345 - RNA, 23 nt, Artificial
  Chemically Synthesized
uacaaauauagugcauggucagu

SEQ ID NO: 1346 - RNA, 23 nt, Artificial
  Chemically Synthesized
cuccauuauaucagcuggcauuu

SEQ ID NO: 1347 - RNA, 23 nt, Artificial
  Chemically Synthesized
uccauuauaucagcuggcauuuu

SEQ ID NO: 1348 - RNA, 23 nt, Artificial
  Chemically Synthesized
guccucuucucucccaguauuca

SEQ ID NO: 1349 - RNA, 23 nt, Artificial
  Chemically Synthesized
uccucuucucucccaguauucaa

SEQ ID NO: 1350 - RNA, 23 nt, Artificial
  Chemically Synthesized
ccaguauucaaguuccuguuuag

SEQ ID NO: 1351 - RNA, 23 nt, Artificial
  Chemically Synthesized
caguauucaaguuccuguuuaga

SEQ ID NO: 1352 - RNA, 23 nt, Artificial
  Chemically Synthesized
ugagacuuucacaaaacuacuga

SEQ ID NO: 1353 - RNA, 23 nt, Artificial
  Chemically Synthesized
uuuuaagagcauuuucaaacauc

SEQ ID NO: 1354 - RNA, 23 nt, Artificial
  Chemically Synthesized
uuuaagagcauuuucaaacaucu

SEQ ID NO: 1355 - RNA, 23 nt, Artificial
  Chemically Synthesized
uuaagagcauuuucaaacaucuu

SEQ ID NO: 1356 - RNA, 23 nt, Artificial
  Chemically Synthesized
uaagagcauuuucaaacaucuuu

SEQ ID NO: 1357 - RNA, 23 nt, Artificial
  Chemically Synthesized
aagagcauuuucaaacaucuuug

SEQ ID NO: 1358 - RNA, 23 nt, Artificial
  Chemically Synthesized
uuaaaaaaacacaaaguaaccac

SEQ ID NO: 1359 - RNA, 23 nt, Artificial
  Chemically Synthesized
uaaaaaaacacaaaguaaccacu

SEQ ID NO: 1360 - RNA, 23 nt, Artificial
  Chemically Synthesized
aaaaaaacacaaaguaaccacuu

SEQ ID NO: 1361 - RNA, 23 nt, Artificial
  Chemically Synthesized
aaaaaacacaaaguaaccacuua

SEQ ID NO: 1362 - RNA, 23 nt, Artificial
  Chemically Synthesized
aaaaacacaaaguaaccacuuaa

SEQ ID NO: 1363 - RNA, 23 nt, Artificial
  Chemically Synthesized
aaaguccucuucucucccaguau

SEQ ID NO: 1364 - RNA, 23 nt, Artificial
  Chemically Synthesized
aaguccucuucucucccaguauu

SEQ ID NO: 1365 - RNA, 23 nt, Artificial
  Chemically Synthesized
ucgguauuaacgcccucgcacgu

SEQ ID NO: 1366 - RNA, 23 nt, Artificial
  Chemically Synthesized
cgguauuaacgcccucgcacgug

SEQ ID NO: 1367 - RNA, 23 nt, Artificial
  Chemically Synthesized
gguauuaacgcccucgcacgugg

SEQ ID NO: 1368 - RNA, 23 nt, Artificial
  Chemically Synthesized
guauuaacgcccucgcacgugga

SEQ ID NO: 1369 - RNA, 23 nt, Artificial
  Chemically Synthesized
uauuaacgcccucgcacguggac

SEQ ID NO: 1370 - RNA, 23 nt, Artificial
  Chemically Synthesized
gaaaugucaucugagcuuuuaua

SEQ ID NO: 1371 - RNA, 23 nt, Artificial
  Chemically Synthesized
aaaugucaucugagcuuuuauaa

SEQ ID NO: 1372 - RNA, 23 nt, Artificial
  Chemically Synthesized
aaugucaucugagcuuuuauaau

SEQ ID NO: 1373 - RNA, 23 nt, Artificial
  Chemically Synthesized
augucaucugagcuuuuauaaua

SEQ ID NO: 1374 - RNA, 23 nt, Artificial
  Chemically Synthesized
ugucaucugagcuuuuauaauac

SEQ ID NO: 1375 - RNA, 23 nt, Artificial
  Chemically Synthesized
uaaaaaacgaaaugucaucugag

SEQ ID NO: 1376 - RNA, 23 nt, Artificial
  Chemically Synthesized
aaaaaacgaaaugucaucugagc

SEQ ID NO: 1377 - RNA, 23 nt, Artificial
  Chemically Synthesized
aaaaacgaaaugucaucugagcu

SEQ ID NO: 1378 - RNA, 23 nt, Artificial
  Chemically Synthesized
aaaacgaaaugucaucugagcuu

SEQ ID NO: 1379 - RNA, 23 nt, Artificial
  Chemically Synthesized
aaacgaaaugucaucugagcuuu

SEQ ID NO: 1380 - RNA, 23 nt, Artificial
  Chemically Synthesized
gagcauuuucaaacaucuuuggc

SEQ ID NO: 1381 - RNA, 23 nt, Artificial
  Chemically Synthesized
aaacuacugagcaagugcugagg

SEQ ID NO: 1382 - RNA, 23 nt, Artificial
  Chemically Synthesized
aacuacugagcaagugcugaggg

SEQ ID NO: 1383 - RNA, 23 nt, Artificial
  Chemically Synthesized
acuacugagcaagugcugagggu

SEQ ID NO: 1384 - RNA, 23 nt, Artificial
  Chemically Synthesized
cuacugagcaagugcugaggguu

SEQ ID NO: 1385 - RNA, 23 nt, Artificial
  Chemically Synthesized
uacugagcaagugcugaggguuu

SEQ ID NO: 1386 - RNA, 23 nt, Artificial
  Chemically Synthesized
acaaaggcgcaauccaauaugaa

SEQ ID NO: 1387 - RNA, 23 nt, Artificial
  Chemically Synthesized
caaaggcgcaauccaauaugaac

SEQ ID NO: 1388 - RNA, 23 nt, Artificial
  Chemically Synthesized
aaaggcgcaauccaauaugaaca

SEQ ID NO: 1389 - RNA, 23 nt, Artificial
  Chemically Synthesized
gcgcuguuccaggaccaaggaga

SEQ ID NO: 1390 - RNA, 23 nt, Artificial
  Chemically Synthesized
cgcuguuccaggaccaaggagag

SEQ ID NO: 1391 - RNA, 23 nt, Artificial
  Chemically Synthesized
gcuguuccaggaccaaggagaga

SEQ ID NO: 1392 - RNA, 23 nt, Artificial
  Chemically Synthesized
cuguuccaggaccaaggagagag

SEQ ID NO: 1393 - RNA, 23 nt, Artificial
  Chemically Synthesized
uguuccaggaccaaggagagagg

SEQ ID NO: 1394 - RNA, 23 nt, Artificial
  Chemically Synthesized
agagcauuuucaaacaucuuugg

SEQ ID NO: 1395 - RNA, 23 nt, Artificial
  Chemically Synthesized
gaaaucucguguaaaaaacgaaa

SEQ ID NO: 1396 - RNA, 23 nt, Artificial
  Chemically Synthesized
aaaucucguguaaaaaacgaaau

SEQ ID NO: 1397 - RNA, 23 nt, Artificial
  Chemically Synthesized
aaucucguguaaaaaacgaaaug

SEQ ID NO: 1398 - RNA, 23 nt, Artificial
  Chemically Synthesized
aucucguguaaaaaacgaaaugu

SEQ ID NO: 1399 - RNA, 23 nt, Artificial
  Chemically Synthesized
ucucguguaaaaaacgaaauguc

SEQ ID NO: 1400 - RNA, 23 nt, Artificial
  Chemically Synthesized
cucccaguauucaaguuccuguu

SEQ ID NO: 1401 - RNA, 23 nt, Artificial
  Chemically Synthesized
cucguucaugcacucgcugaagc

SEQ ID NO: 1402 - RNA, 23 nt, Artificial
  Chemically Synthesized
ucguucaugcacucgcugaagcc

SEQ ID NO: 1403 - RNA, 23 nt, Artificial
  Chemically Synthesized
cguucaugcacucgcugaagccg

SEQ ID NO: 1404 - RNA, 23 nt, Artificial
  Chemically Synthesized
guucaugcacucgcugaagccgg

SEQ ID NO: 1405 - RNA, 23 nt, Artificial
  Chemically Synthesized
uucaugcacucgcugaagccggc

SEQ ID NO: 1406 - RNA, 23 nt, Artificial
  Chemically Synthesized
gagcauccaaaaucaguguuuuc

SEQ ID NO: 1407 - RNA, 23 nt, Artificial
  Chemically Synthesized
uguaaaaaacgaaaugucaucug

SEQ ID NO: 1408 - RNA, 23 nt, Artificial
  Chemically Synthesized
guaaaaaacgaaaugucaucuga

SEQ ID NO: 1409 - RNA, 23 nt, Artificial
  Chemically Synthesized
aacgaaaugucaucugagcuuuu

SEQ ID NO: 1410 - RNA, 23 nt, Artificial
  Chemically Synthesized
acgaaaugucaucugagcuuuua

SEQ ID NO: 1411 - RNA, 23 nt, Artificial
  Chemically Synthesized
aguccucuucucucccaguauuc

SEQ ID NO: 1412 - RNA, 23 nt, Artificial
  Chemically Synthesized
ucccaguauucaaguuccuguuu

SEQ ID NO: 1413 - RNA, 23 nt, Artificial
  Chemically Synthesized
cccaguauucaaguuccuguuua

SEQ ID NO: 1414 - RNA, 23 nt, Artificial
  Chemically Synthesized
ugaggaaagcaaacuggccaucg

SEQ ID NO: 1415 - RNA, 23 nt, Artificial
  Chemically Synthesized
uuuguggcuacuuggugaucagu

SEQ ID NO: 1416 - RNA, 23 nt, Artificial
  Chemically Synthesized
uuguggcuacuuggugaucagua

SEQ ID NO: 1417 - RNA, 23 nt, Artificial
  Chemically Synthesized
uguggcuacuuggugaucaguag

SEQ ID NO: 1418 - RNA, 23 nt, Artificial
  Chemically Synthesized
ucugugcucagaugcugucuuug

SEQ ID NO: 1419 - RNA, 23 nt, Artificial
  Chemically Synthesized
cugugcucagaugcugucuuugg

SEQ ID NO: 1420 - RNA, 23 nt, Artificial
  Chemically Synthesized
ugugcucagaugcugucuuuggu

SEQ ID NO: 1421 - RNA, 23 nt, Artificial
  Chemically Synthesized
gcugucuuugguuuauccggugu

SEQ ID NO: 1422 - RNA, 23 nt, Artificial
  Chemically Synthesized
cugucuuugguuuauccgguguc

SEQ ID NO: 1423 - RNA, 23 nt, Artificial
  Chemically Synthesized
ugugucucuuuuacuugagacuu

SEQ ID NO: 1424 - RNA, 23 nt, Artificial
  Chemically Synthesized
gugucucuuuuacuugagacuuu

SEQ ID NO: 1425 - RNA, 23 nt, Artificial
  Chemically Synthesized
ccgcuggaaggugacacugcguu

SEQ ID NO: 1426 - RNA, 23 nt, Artificial
  Chemically Synthesized
cgcuggaaggugacacugcguug

SEQ ID NO: 1427 - RNA, 23 nt, Artificial
  Chemically Synthesized
gcuggaaggugacacugcguugg

SEQ ID NO: 1428 - RNA, 23 nt, Artificial
  Chemically Synthesized
cuggaaggugacacugcguuggg

SEQ ID NO: 1429 - RNA, 23 nt, Artificial
  Chemically Synthesized
uggaaggugacacugcguugggg

SEQ ID NO: 1430 - RNA, 23 nt, Artificial
  Chemically Synthesized
aggucauggcauugaucuggguc

SEQ ID NO: 1431 - RNA, 23 nt, Artificial
  Chemically Synthesized
ggucauggcauugaucuggguca

SEQ ID NO: 1432 - RNA, 23 nt, Artificial
  Chemically Synthesized
gucauggcauugaucugggucau

SEQ ID NO: 1433 - RNA, 23 nt, Artificial
  Chemically Synthesized
ucauggcauugaucugggucaug

SEQ ID NO: 1434 - RNA, 23 nt, Artificial
  Chemically Synthesized
cauggcauugaucugggucaugc

SEQ ID NO: 1435 - RNA, 23 nt, Artificial
  Chemically Synthesized
cgggucaccucguucaugcacuc

SEQ ID NO: 1436 - RNA, 23 nt, Artificial
  Chemically Synthesized
gggucaccucguucaugcacucg

SEQ ID NO: 1437 - RNA, 23 nt, Artificial
  Chemically Synthesized
ggucaccucguucaugcacucgc

SEQ ID NO: 1438 - RNA, 23 nt, Artificial
  Chemically Synthesized
gucaccucguucaugcacucgcu

SEQ ID NO: 1439 - RNA, 23 nt, Artificial
  Chemically Synthesized
ucaccucguucaugcacucgcug

SEQ ID NO: 1440 - RNA, 23 nt, Artificial
  Chemically Synthesized
uccagaauguccgccuucuccag

SEQ ID NO: 1441 - RNA, 23 nt, Artificial
  Chemically Synthesized
ugccgcgagcuaucuuucuucag

SEQ ID NO: 1442 - RNA, 23 nt, Artificial
  Chemically Synthesized
ucacaaaacuacugagcaagugc

SEQ ID NO: 1443 - RNA, 23 nt, Artificial
  Chemically Synthesized
cacaaaacuacugagcaagugcu

SEQ ID NO: 1444 - RNA, 23 nt, Artificial
  Chemically Synthesized
acaaaacuacugagcaagugcug

SEQ ID NO: 1445 - RNA, 23 nt, Artificial
  Chemically Synthesized
caaaacuacugagcaagugcuga

SEQ ID NO: 1446 - RNA, 23 nt, Artificial
  Chemically Synthesized
aaaacuacugagcaagugcugag

SEQ ID NO: 1447 - RNA, 23 nt, Artificial
  Chemically Synthesized
cgaaaugucaucugagcuuuuau

SEQ ID NO: 1448 - RNA, 23 nt, Artificial
  Chemically Synthesized
cucucuacaaaaaguaacuucuu

SEQ ID NO: 1449 - RNA, 23 nt, Artificial
  Chemically Synthesized
ucucuacaaaaaguaacuucuua

SEQ ID NO: 1450 - RNA, 23 nt, Artificial
  Chemically Synthesized
cucuacaaaaaguaacuucuuag

SEQ ID NO: 1451 - RNA, 23 nt, Artificial
  Chemically Synthesized
uccuguuuagaguccggagggaa

SEQ ID NO: 1452 - RNA, 23 nt, Artificial
  Chemically Synthesized
aaaucaguguuuucagcuggcuc

SEQ ID NO: 1453 - RNA, 23 nt, Artificial
  Chemically Synthesized
aaucaguguuuucagcuggcuca

SEQ ID NO: 1454 - RNA, 23 nt, Artificial
  Chemically Synthesized
gagacuuucacaaaacuacugag

SEQ ID NO: 1455 - RNA, 23 nt, Artificial
  Chemically Synthesized
auggcauugaucugggucaugca

SEQ ID NO: 1456 - RNA, 23 nt, Artificial
  Chemically Synthesized
gccgcgagcuaucuuucuucaga

SEQ ID NO: 1457 - RNA, 23 nt, Artificial
  Chemically Synthesized
ccgcgagcuaucuuucuucagag

SEQ ID NO: 1458 - RNA, 23 nt, Artificial
  Chemically Synthesized
uuggaguucuucacgaaaaagaa

SEQ ID NO: 1459 - RNA, 23 nt, Artificial
  Chemically Synthesized
aaacaucuuuggcaucacauaaa

SEQ ID NO: 1460 - RNA, 23 nt, Artificial
  Chemically Synthesized
aacaucuuuggcaucacauaaaa

SEQ ID NO: 1461 - RNA, 23 nt, Artificial
  Chemically Synthesized
acaucuuuggcaucacauaaaaa

SEQ ID NO: 1462 - RNA, 23 nt, Artificial
  Chemically Synthesized
caucuuuggcaucacauaaaaaa

SEQ ID NO: 1463 - RNA, 23 nt, Artificial
  Chemically Synthesized
ugagcuuuuauaauacaaaggcg

SEQ ID NO: 1464 - RNA, 23 nt, Artificial
  Chemically Synthesized
gagcaagugcugaggguuuauua

SEQ ID NO: 1465 - RNA, 23 nt, Artificial
  Chemically Synthesized
agcaagugcugaggguuuauuau

SEQ ID NO: 1466 - RNA, 23 nt, Artificial
  Chemically Synthesized
gcaagugcugaggguuuauuaua

SEQ ID NO: 1467 - RNA, 23 nt, Artificial
  Chemically Synthesized
caagugcugaggguuuauuauau

SEQ ID NO: 1468 - RNA, 23 nt, Artificial
  Chemically Synthesized
aagugcugaggguuuauuauauu

SEQ ID NO: 1469 - RNA, 23 nt, Artificial
  Chemically Synthesized
agugcugaggguuuauuauauuu

SEQ ID NO: 1470 - RNA, 23 nt, Artificial
  Chemically Synthesized
gugcugaggguuuauuauauuuu

SEQ ID NO: 1471 - RNA, 23 nt, Artificial
  Chemically Synthesized
ugcugaggguuuauuauauuuug

SEQ ID NO: 1472 - RNA, 23 nt, Artificial
  Chemically Synthesized
cuccaaacaccuuagccgccucu

SEQ ID NO: 1473 - RNA, 23 nt, Artificial
  Chemically Synthesized
uccaaacaccuuagccgccucuc

SEQ ID NO: 1474 - RNA, 23 nt, Artificial
  Chemically Synthesized
ccaaacaccuuagccgccucucc

SEQ ID NO: 1475 - RNA, 23 nt, Artificial
  Chemically Synthesized
caaacaccuuagccgccucucca

SEQ ID NO: 1476 - RNA, 23 nt, Artificial
  Chemically Synthesized
aaacaccuuagccgccucuccag

SEQ ID NO: 1477 - RNA, 23 nt, Artificial
  Chemically Synthesized
ccagaauguccgccuucuccagc

SEQ ID NO: 1478 - RNA, 23 nt, Artificial
  Chemically Synthesized
cagaauguccgccuucuccagcu

SEQ ID NO: 1479 - RNA, 23 nt, Artificial
  Chemically Synthesized
agaauguccgccuucuccagcuu

SEQ ID NO: 1480 - RNA, 23 nt, Artificial
  Chemically Synthesized
caaacaucuuuggcaucacauaa

SEQ ID NO: 1481 - RNA, 23 nt, Artificial
  Chemically Synthesized
caccucguucaugcacucgcuga

SEQ ID NO: 1482 - RNA, 23 nt, Artificial
  Chemically Synthesized
accucguucaugcacucgcugaa

SEQ ID NO: 1483 - RNA, 23 nt, Artificial
  Chemically Synthesized
ccucguucaugcacucgcugaag

SEQ ID NO: 1484 - RNA, 23 nt, Artificial
  Chemically Synthesized
ccggugucguguugacacuggcu

SEQ ID NO: 1485 - RNA, 23 nt, Artificial
  Chemically Synthesized
cggugucguguugacacuggcug

SEQ ID NO: 1486 - RNA, 23 nt, Artificial
  Chemically Synthesized
ggugucguguugacacuggcugg

SEQ ID NO: 1487 - RNA, 23 nt, Artificial
  Chemically Synthesized
gugucguguugacacuggcuggg

SEQ ID NO: 1488 - RNA, 23 nt, Artificial
  Chemically Synthesized
ugucguguugacacuggcugggg

SEQ ID NO: 1489 - RNA, 23 nt, Artificial
  Chemically Synthesized
cuggaagccuccaaacaccuuag

SEQ ID NO: 1490 - RNA, 23 nt, Artificial
  Chemically Synthesized
uggaagccuccaaacaccuuagc

SEQ ID NO: 1491 - RNA, 23 nt, Artificial
  Chemically Synthesized
ggaagccuccaaacaccuuagcc

SEQ ID NO: 1492 - RNA, 23 nt, Artificial
  Chemically Synthesized
gaagccuccaaacaccuuagccg

SEQ ID NO: 1493 - RNA, 23 nt, Artificial
  Chemically Synthesized
aagccuccaaacaccuuagccgc

SEQ ID NO: 1494 - RNA, 23 nt, Artificial
  Chemically Synthesized
gcgggucaccucguucaugcacu

SEQ ID NO: 1495 - RNA, 23 nt, Artificial
  Chemically Synthesized
ccggaggugcuucacugucauuu

SEQ ID NO: 1496 - RNA, 23 nt, Artificial
  Chemically Synthesized
cggaggugcuucacugucauuuc

SEQ ID NO: 1497 - RNA, 23 nt, Artificial
  Chemically Synthesized
ggaggugcuucacugucauuucc

SEQ ID NO: 1498 - RNA, 23 nt, Artificial
  Chemically Synthesized
uggcaucacauaaaaaagaaauc

SEQ ID NO: 1499 - RNA, 23 nt, Artificial
  Chemically Synthesized
aaaacacaaaguaaccacuuaau

SEQ ID NO: 1500 - RNA, 23 nt, Artificial
  Chemically Synthesized
caccuggaagccuccaaacaccu

SEQ ID NO: 1501 - RNA, 23 nt, Artificial
  Chemically Synthesized
accuggaagccuccaaacaccuu

SEQ ID NO: 1502 - RNA, 23 nt, Artificial
  Chemically Synthesized
ccuggaagccuccaaacaccuua

SEQ ID NO: 1503 - RNA, 23 nt, Artificial
  Chemically Synthesized
aucaguguuuucagcuggcucag

SEQ ID NO: 1504 - RNA, 23 nt, Artificial
  Chemically Synthesized
ucaguguuuucagcuggcucaga

SEQ ID NO: 1505 - RNA, 23 nt, Artificial
  Chemically Synthesized
caguguuuucagcuggcucagac

SEQ ID NO: 1506 - RNA, 23 nt, Artificial
  Chemically Synthesized
ccaaaggaagauauuuuaagagc

SEQ ID NO: 1507 - RNA, 23 nt, Artificial
  Chemically Synthesized
caaaggaagauauuuuaagagca

SEQ ID NO: 1508 - RNA, 23 nt, Artificial
  Chemically Synthesized
aaaggaagauauuuuaagagcau

SEQ ID NO: 1509 - RNA, 23 nt, Artificial
  Chemically Synthesized
aaggaagauauuuuaagagcauu

SEQ ID NO: 1510 - RNA, 23 nt, Artificial
  Chemically Synthesized
aggaagauauuuuaagagcauuu

SEQ ID NO: 1511 - RNA, 23 nt, Artificial
  Chemically Synthesized
gaggaaagcaaacuggccaucgg

SEQ ID NO: 1512 - RNA, 23 nt, Artificial
  Chemically Synthesized
aggaaagcaaacuggccaucggg

SEQ ID NO: 1513 - RNA, 23 nt, Artificial
  Chemically Synthesized
ggaaagcaaacuggccaucggga

SEQ ID NO: 1514 - RNA, 23 nt, Artificial
  Chemically Synthesized
gaaagcaaacuggccaucgggag

SEQ ID NO: 1515 - RNA, 23 nt, Artificial
  Chemically Synthesized
aaagcaaacuggccaucgggagc

SEQ ID NO: 1516 - RNA, 23 nt, Artificial
  Chemically Synthesized
cgagugcgcaccucgguauuaac

SEQ ID NO: 1517 - RNA, 23 nt, Artificial
  Chemically Synthesized
gagugcgcaccucgguauuaacg

SEQ ID NO: 1518 - RNA, 23 nt, Artificial
  Chemically Synthesized
agugcgcaccucgguauuaacgc

SEQ ID NO: 1519 - RNA, 23 nt, Artificial
  Chemically Synthesized
gugcgcaccucgguauuaacgcc

SEQ ID NO: 1520 - RNA, 23 nt, Artificial
  Chemically Synthesized
ugcgcaccucgguauuaacgccc

SEQ ID NO: 1521 - RNA, 23 nt, Artificial
  Chemically Synthesized
aaacacaaaguaaccacuuaauc

SEQ ID NO: 1522 - RNA, 23 nt, Artificial
  Chemically Synthesized
cagcuggcucagacuuucauuua

SEQ ID NO: 1523 - RNA, 23 nt, Artificial
  Chemically Synthesized
agcuggcucagacuuucauuuau

SEQ ID NO: 1524 - RNA, 23 nt, Artificial
  Chemically Synthesized
gcuggcucagacuuucauuuauu

SEQ ID NO: 1525 - RNA, 23 nt, Artificial
  Chemically Synthesized
cuggcucagacuuucauuuauuc

SEQ ID NO: 1526 - RNA, 23 nt, Artificial
  Chemically Synthesized
uggcucagacuuucauuuauucu

SEQ ID NO: 1527 - RNA, 23 nt, Artificial
  Chemically Synthesized
ggcucagacuuucauuuauucuu

SEQ ID NO: 1528 - RNA, 23 nt, Artificial
  Chemically Synthesized
gcucagacuuucauuuauucuug

SEQ ID NO: 1529 - RNA, 23 nt, Artificial
  Chemically Synthesized
cucagacuuucauuuauucuugc

SEQ ID NO: 1530 - RNA, 23 nt, Artificial
  Chemically Synthesized
ugaugacuuucugugcucagaug

SEQ ID NO: 1531 - RNA, 23 nt, Artificial
  Chemically Synthesized
cucguguaaaaaacgaaauguca

SEQ ID NO: 1532 - RNA, 23 nt, Artificial
  Chemically Synthesized
ucguguaaaaaacgaaaugucau

SEQ ID NO: 1533 - RNA, 23 nt, Artificial
  Chemically Synthesized
cguguaaaaaacgaaaugucauc

SEQ ID NO: 1534 - RNA, 23 nt, Artificial
  Chemically Synthesized
guguaaaaaacgaaaugucaucu

SEQ ID NO: 1535 - RNA, 23 nt, Artificial
  Chemically Synthesized
uauccggugucguguugacacug

SEQ ID NO: 1536 - RNA, 23 nt, Artificial
  Chemically Synthesized
auccggugucguguugacacugg

SEQ ID NO: 1537 - RNA, 23 nt, Artificial
  Chemically Synthesized
aaagaaaucucguguaaaaaacg

SEQ ID NO: 1538 - RNA, 23 nt, Artificial
  Chemically Synthesized
aagaaaucucguguaaaaaacga

SEQ ID NO: 1539 - RNA, 23 nt, Artificial
  Chemically Synthesized
agaaaucucguguaaaaaacgaa

SEQ ID NO: 1540 - RNA, 23 nt, Artificial
  Chemically Synthesized
aaggcgcaauccaauaugaacau

SEQ ID NO: 1541 - RNA, 23 nt, Artificial
  Chemically Synthesized
aggcgcaauccaauaugaacaua

SEQ ID NO: 1542 - RNA, 23 nt, Artificial
  Chemically Synthesized
ggcgcaauccaauaugaacauau

SEQ ID NO: 1543 - RNA, 23 nt, Artificial
  Chemically Synthesized
gcgcaauccaauaugaacauaua

SEQ ID NO: 1544 - RNA, 23 nt, Artificial
  Chemically Synthesized
aacacaaaguaaccacuuaauca

SEQ ID NO: 1545 - RNA, 23 nt, Artificial
  Chemically Synthesized
acacaaaguaaccacuuaaucaa

SEQ ID NO: 1546 - RNA, 23 nt, Artificial
  Chemically Synthesized
cacaaaguaaccacuuaaucaaa

SEQ ID NO: 1547 - RNA, 23 nt, Artificial
  Chemically Synthesized
acaaaguaaccacuuaaucaaaa

SEQ ID NO: 1548 - RNA, 23 nt, Artificial
  Chemically Synthesized
caaaguaaccacuuaaucaaaaa

SEQ ID NO: 1549 - RNA, 23 nt, Artificial
  Chemically Synthesized
guggcuacuuggugaucaguagc

SEQ ID NO: 1550 - RNA, 23 nt, Artificial
  Chemically Synthesized
ggggauuccgcuguuaucagcac

SEQ ID NO: 1551 - RNA, 23 nt, Artificial
  Chemically Synthesized
uggaguucuucacgaaaaagaau

SEQ ID NO: 1552 - RNA, 23 nt, Artificial
  Chemically Synthesized
ggaguucuucacgaaaaagaauu

SEQ ID NO: 1553 - RNA, 23 nt, Artificial
  Chemically Synthesized
gaguucuucacgaaaaagaauuu

SEQ ID NO: 1554 - RNA, 23 nt, Artificial
  Chemically Synthesized
uaccaccuggaagccuccaaaca

SEQ ID NO: 1555 - RNA, 23 nt, Artificial
  Chemically Synthesized
accaccuggaagccuccaaacac

SEQ ID NO: 1556 - RNA, 23 nt, Artificial
  Chemically Synthesized
ccaccuggaagccuccaaacacc

SEQ ID NO: 1557 - RNA, 23 nt, Artificial
  Chemically Synthesized
acagcucucucuacaaaaaguaa

SEQ ID NO: 1558 - RNA, 23 nt, Artificial
  Chemically Synthesized
cgcgagcuaucuuucuucagagc

SEQ ID NO: 1559 - RNA, 23 nt, Artificial
  Chemically Synthesized
gcgagcuaucuuucuucagagca

SEQ ID NO: 1560 - RNA, 23 nt, Artificial
  Chemically Synthesized
cgagcuaucuuucuucagagcau

SEQ ID NO: 1561 - RNA, 23 nt, Artificial
  Chemically Synthesized
aaaagaaaucucguguaaaaaac

SEQ ID NO: 1562 - RNA, 23 nt, Artificial
  Chemically Synthesized
acugagcaagugcugaggguuua

SEQ ID NO: 1563 - RNA, 23 nt, Artificial
  Chemically Synthesized
ugagcaagugcugaggguuuauu

SEQ ID NO: 1564 - RNA, 23 nt, Artificial
  Chemically Synthesized
gucaucugagcuuuuauaauaca

SEQ ID NO: 1565 - RNA, 23 nt, Artificial
  Chemically Synthesized
ccccguugggaaugaggaaagca

SEQ ID NO: 1566 - RNA, 23 nt, Artificial
  Chemically Synthesized
guaaccacuuaaucaaaaaaguc

SEQ ID NO: 1567 - RNA, 23 nt, Artificial
  Chemically Synthesized
agccuccaaacaccuuagccgcc

SEQ ID NO: 1568 - RNA, 23 nt, Artificial
  Chemically Synthesized
gcgcaccucgguauuaacgcccu

SEQ ID NO: 1569 - RNA, 23 nt, Artificial
  Chemically Synthesized
cgcaccucgguauuaacgcccuc

SEQ ID NO: 1570 - RNA, 23 nt, Artificial
  Chemically Synthesized
gcaccucgguauuaacgcccucg

SEQ ID NO: 1571 - RNA, 23 nt, Artificial
  Chemically Synthesized
caccucgguauuaacgcccucgc

SEQ ID NO: 1572 - RNA, 23 nt, Artificial
  Chemically Synthesized
accucgguauuaacgcccucgca

SEQ ID NO: 1573 - RNA, 23 nt, Artificial
  Chemically Synthesized
cagcacacuugggucugugcuca

SEQ ID NO: 1574 - RNA, 23 nt, Artificial
  Chemically Synthesized
agcacacuugggucugugcucag

SEQ ID NO: 1575 - RNA, 23 nt, Artificial
  Chemically Synthesized
gcacacuugggucugugcucagc

SEQ ID NO: 1576 - RNA, 23 nt, Artificial
  Chemically Synthesized
cacacuugggucugugcucagcg

SEQ ID NO: 1577 - RNA, 23 nt, Artificial
  Chemically Synthesized
acacuugggucugugcucagcgc

SEQ ID NO: 1578 - RNA, 23 nt, Artificial
  Chemically Synthesized
ccggggacgaggaauuuuucucc

SEQ ID NO: 1579 - RNA, 23 nt, Artificial
  Chemically Synthesized
cggggacgaggaauuuuucucca

SEQ ID NO: 1580 - RNA, 23 nt, Artificial
  Chemically Synthesized
ggggacgaggaauuuuucuccau

SEQ ID NO: 1581 - RNA, 23 nt, Artificial
  Chemically Synthesized
gggacgaggaauuuuucuccauu

SEQ ID NO: 1582 - RNA, 23 nt, Artificial
  Chemically Synthesized
ggacgaggaauuuuucuccauua

SEQ ID NO: 1583 - RNA, 23 nt, Artificial
  Chemically Synthesized
ccgccuucuccagcuuggaaugc

SEQ ID NO: 1584 - RNA, 23 nt, Artificial
  Chemically Synthesized
cugagcuuuuauaauacaaaggc

SEQ ID NO: 1585 - RNA, 23 nt, Artificial
  Chemically Synthesized
guuccaggaccaaggagagaggu

SEQ ID NO: 1586 - RNA, 23 nt, Artificial
  Chemically Synthesized
uuccaggaccaaggagagaggua

SEQ ID NO: 1587 - RNA, 23 nt, Artificial
  Chemically Synthesized
cgggguaggucauggcauugauc

SEQ ID NO: 1588 - RNA, 23 nt, Artificial
  Chemically Synthesized
ucagacuuucauuuauucuugcu

SEQ ID NO: 1589 - RNA, 23 nt, Artificial
  Chemically Synthesized
gggggauuccgcuguuaucagca

SEQ ID NO: 1590 - RNA, 23 nt, Artificial
  Chemically Synthesized
accggggacgaggaauuuuucuc

SEQ ID NO: 1591 - RNA, 23 nt, Artificial
  Chemically Synthesized
cuuccccaaaggaagauauuuua

SEQ ID NO: 1592 - RNA, 23 nt, Artificial
  Chemically Synthesized
uuccccaaaggaagauauuuuaa

SEQ ID NO: 1593 - RNA, 23 nt, Artificial
  Chemically Synthesized
uccccaaaggaagauauuuuaag

SEQ ID NO: 1594 - RNA, 23 nt, Artificial
  Chemically Synthesized
ccccaaaggaagauauuuuaaga

SEQ ID NO: 1595 - RNA, 23 nt, Artificial
  Chemically Synthesized
cccaaaggaagauauuuuaagag

SEQ ID NO: 1596 - RNA, 23 nt, Artificial
  Chemically Synthesized
uccgccuucuccagcuuggaaug

SEQ ID NO: 1597 - RNA, 23 nt, Artificial
  Chemically Synthesized
gacgaggaauuuuucuccauuau

SEQ ID NO: 1598 - RNA, 23 nt, Artificial
  Chemically Synthesized
acgaggaauuuuucuccauuaua

SEQ ID NO: 1599 - RNA, 23 nt, Artificial
  Chemically Synthesized
caggaccaaggagagagguagac

SEQ ID NO: 1600 - RNA, 23 nt, Artificial
  Chemically Synthesized
aggaccaaggagagagguagacg

SEQ ID NO: 1601 - RNA, 23 nt, Artificial
  Chemically Synthesized
ggaccaaggagagagguagacgg

SEQ ID NO: 1602 - RNA, 23 nt, Artificial
  Chemically Synthesized
gaccaaggagagagguagacggg

SEQ ID NO: 1603 - RNA, 23 nt, Artificial
  Chemically Synthesized
accaaggagagagguagacgggg

SEQ ID NO: 1604 - RNA, 23 nt, Artificial
  Chemically Synthesized
ggaagauauuuuaagagcauuuu

SEQ ID NO: 1605 - RNA, 23 nt, Artificial
  Chemically Synthesized
cccgggguaggucauggcauuga

SEQ ID NO: 1606 - RNA, 23 nt, Artificial
  Chemically Synthesized
ccgggguaggucauggcauugau

SEQ ID NO: 1607 - RNA, 23 nt, Artificial
  Chemically Synthesized
guccgccuucuccagcuuggaau

SEQ ID NO: 1608 - RNA, 23 nt, Artificial
  Chemically Synthesized
cgaggaauuuuucuccauuauau

SEQ ID NO: 1609 - RNA, 23 nt, Artificial
  Chemically Synthesized
aguucuucacgaaaaagaauuuu

SEQ ID NO: 1610 - RNA, 23 nt, Artificial
  Chemically Synthesized
gcugaggguuuauuauauuuugu

SEQ ID NO: 1611 - RNA, 23 nt, Artificial
  Chemically Synthesized
ggccccguugggaaugaggaaag

SEQ ID NO: 1612 - RNA, 23 nt, Artificial
  Chemically Synthesized
gccccguugggaaugaggaaagc

SEQ ID NO: 1613 - RNA, 23 nt, Artificial
  Chemically Synthesized
gaggaauuuuucuccauuauauc

SEQ ID NO: 1614 - RNA, 23 nt, Artificial
  Chemically Synthesized
cgggggauuccgcuguuaucagc

SEQ ID NO: 1615 - RNA, 23 nt, Artificial
  Chemically Synthesized
ccgagugcgcaccucgguauuaa

SEQ ID NO: 1616 - RNA, 23 nt, Artificial
  Chemically Synthesized
acgggggauuccgcuguuaucag

SEQ ID NO: 1617 - RNA, 23 nt, Artificial
  Chemically Synthesized
gccgagugcgcaccucgguauua

SEQ ID NO: 1618 - RNA, 23 nt, Artificial
  Chemically Synthesized
guucuucacgaaaaagaauuuuu

SEQ ID NO: 1619 - RNA, 23 nt, Artificial
  Chemically Synthesized
aggccccguugggaaugaggaaa

SEQ ID NO: 1620 - RNA, 23 nt, Artificial
  Chemically Synthesized
uccaggaccaaggagagagguag

SEQ ID NO: 1621 - RNA, 23 nt, Artificial
  Chemically Synthesized
ccaggaccaaggagagagguaga

SEQ ID NO: 1622 - RNA, 23 nt, Artificial
  Chemically Synthesized
cgcaauccaauaugaacauauaa

SEQ ID NO: 1623 - RNA, 23 nt, Artificial
  Chemically Synthesized
uuccggaggugcuucacugucau

SEQ ID NO: 1624 - RNA, 23 nt, Artificial
  Chemically Synthesized
uccggaggugcuucacugucauu

SEQ ID NO: 1625 - RNA, 23 nt, Artificial
  Chemically Synthesized
ggcaucacauaaaaaagaaaucu

SEQ ID NO: 1626 - RNA, 23 nt, Artificial
  Chemically Synthesized
gcaauccaauaugaacauauaaa

SEQ ID NO: 1627 - RNA, 19 nt, Artificial
  Chemically Synthesized
ccuccacuaugauccuuaa

SEQ ID NO: 1628 - RNA, 19 nt, Artificial
  Chemically Synthesized
gcuguauccucauaggaaa

SEQ ID NO: 1629 - RNA, 19 nt, Artificial
  Chemically Synthesized
ccgaagccgccauaauaaa

SEQ ID NO: 1630 - RNA, 19 nt, Artificial
  Chemically Synthesized
ccgccauaauaaaaucuga

SEQ ID NO: 1631 - RNA, 19 nt, Artificial
  Chemically Synthesized
cgaagccgccauaauaaaa

SEQ ID NO: 1632 - RNA, 19 nt, Artificial
  Chemically Synthesized
cagagucccugccguuuua

SEQ ID NO: 1633 - RNA, 19 nt, Artificial
  Chemically Synthesized
agaugaagcugcuguacca

SEQ ID NO: 1634 - RNA, 19 nt, Artificial
  Chemically Synthesized
cuaccugaagcacagcaaa

SEQ ID NO: 1635 - RNA, 19 nt, Artificial
  Chemically Synthesized
acgacuuuguacucagaaa

SEQ ID NO: 1636 - RNA, 19 nt, Artificial
  Chemically Synthesized
gguuguucuguguuugcau

SEQ ID NO: 1637 - RNA, 19 nt, Artificial
  Chemically Synthesized
cuccgaagccgccauaaua

SEQ ID NO: 1638 - RNA, 19 nt, Artificial
  Chemically Synthesized
ccaacuccaagcuggagaa

SEQ ID NO: 1639 - RNA, 19 nt, Artificial
  Chemically Synthesized
agaaaaaccgacugcggaa

SEQ ID NO: 1640 - RNA, 19 nt, Artificial
  Chemically Synthesized
cgcagaugaagcugcugua

SEQ ID NO: 1641 - RNA, 19 nt, Artificial
  Chemically Synthesized
cuuuguacucagaaauuga

SEQ ID NO: 1642 - RNA, 19 nt, Artificial
  Chemically Synthesized
guucuguguuugcauuuaa

SEQ ID NO: 1643 - RNA, 19 nt, Artificial
  Chemically Synthesized
cagagaaugugugugcaga

SEQ ID NO: 1644 - RNA, 19 nt, Artificial
  Chemically Synthesized
gcacgacuuuguacucaga

SEQ ID NO: 1645 - RNA, 19 nt, Artificial
  Chemically Synthesized
gguucuaugauauuuguag

SEQ ID NO: 1646 - RNA, 19 nt, Artificial
  Chemically Synthesized
gcuaccugaagcacagcaa

SEQ ID NO: 1647 - RNA, 19 nt, Artificial
  Chemically Synthesized
aacucucagucacguggaa

SEQ ID NO: 1648 - RNA, 19 nt, Artificial
  Chemically Synthesized
cgacuuuguacucagaaau

SEQ ID NO: 1649 - RNA, 19 nt, Artificial
  Chemically Synthesized
ccaaaaggcuccugagugu

SEQ ID NO: 1650 - RNA, 19 nt, Artificial
  Chemically Synthesized
caaucagggcccaucuucu

SEQ ID NO: 1651 - RNA, 19 nt, Artificial
  Chemically Synthesized
cgccauaauaaaaucugau

SEQ ID NO: 1652 - RNA, 19 nt, Artificial
  Chemically Synthesized
ggguucuaugauauuugua

SEQ ID NO: 1653 - RNA, 19 nt, Artificial
  Chemically Synthesized
uggagauggcugucagcua

SEQ ID NO: 1654 - RNA, 19 nt, Artificial
  Chemically Synthesized
cacgacuuuguacucagaa

SEQ ID NO: 1655 - RNA, 19 nt, Artificial
  Chemically Synthesized
ccucauaggaaacagugau

SEQ ID NO: 1656 - RNA, 19 nt, Artificial
  Chemically Synthesized
ggguuguucuguguuugca

SEQ ID NO: 1657 - RNA, 19 nt, Artificial
  Chemically Synthesized
gugugggcacgacuuugua

SEQ ID NO: 1658 - RNA, 19 nt, Artificial
  Chemically Synthesized
gaagccgccauaauaaaau

SEQ ID NO: 1659 - RNA, 19 nt, Artificial
  Chemically Synthesized
cuccacuaugauccuuaaa

SEQ ID NO: 1660 - RNA, 19 nt, Artificial
  Chemically Synthesized
gagaaaaaccgacugcgga

SEQ ID NO: 1661 - RNA, 19 nt, Artificial
  Chemically Synthesized
cucagaaauugaacucuca

SEQ ID NO: 1662 - RNA, 19 nt, Artificial
  Chemically Synthesized
cuaugauccuuaaaggauu

SEQ ID NO: 1663 - RNA, 19 nt, Artificial
  Chemically Synthesized
agcuguauccucauaggaa

SEQ ID NO: 1664 - RNA, 19 nt, Artificial
  Chemically Synthesized
gcaucaacagcagcaucga

SEQ ID NO: 1665 - RNA, 19 nt, Artificial
  Chemically Synthesized
cccugccguuuuaggacaa

SEQ ID NO: 1666 - RNA, 19 nt, Artificial
  Chemically Synthesized
gccuuuugugaaggccgaa

SEQ ID NO: 1667 - RNA, 19 nt, Artificial
  Chemically Synthesized
cuaugauauuuguagugcc

SEQ ID NO: 1668 - RNA, 19 nt, Artificial
  Chemically Synthesized
aggacuacagcgaaggcua

SEQ ID NO: 1669 - RNA, 19 nt, Artificial
  Chemically Synthesized
uccgaagccgccauaauaa

SEQ ID NO: 1670 - RNA, 19 nt, Artificial
  Chemically Synthesized
gccuccacuaugauccuua

SEQ ID NO: 1671 - RNA, 19 nt, Artificial
  Chemically Synthesized
gaacucucagucacgugga

SEQ ID NO: 1672 - RNA, 19 nt, Artificial
  Chemically Synthesized
gcacauuugccuuuuguga

SEQ ID NO: 1673 - RNA, 19 nt, Artificial
  Chemically Synthesized
agcaagugacuucugggaa

SEQ ID NO: 1674 - RNA, 19 nt, Artificial
  Chemically Synthesized
cugucagcuaccugaagca

SEQ ID NO: 1675 - RNA, 19 nt, Artificial
  Chemically Synthesized
uggcugucagcuaccugaa

SEQ ID NO: 1676 - RNA, 19 nt, Artificial
  Chemically Synthesized
cacauuugccuuuugugaa

SEQ ID NO: 1677 - RNA, 19 nt, Artificial
  Chemically Synthesized
gccguuuuaggacaaucag

SEQ ID NO: 1678 - RNA, 19 nt, Artificial
  Chemically Synthesized
cucagagaaugugugugca

SEQ ID NO: 1679 - RNA, 19 nt, Artificial
  Chemically Synthesized
gacuuuguacucagaaauu

SEQ ID NO: 1680 - RNA, 19 nt, Artificial
  Chemically Synthesized
cacuaugauccuuaaagga

SEQ ID NO: 1681 - RNA, 19 nt, Artificial
  Chemically Synthesized
uugugaaggccgaacucga

SEQ ID NO: 1682 - RNA, 19 nt, Artificial
  Chemically Synthesized
agcugcuguaccacuucca

SEQ ID NO: 1683 - RNA, 19 nt, Artificial
  Chemically Synthesized
gcaagugacuucugggaag

SEQ ID NO: 1684 - RNA, 19 nt, Artificial
  Chemically Synthesized
uguucuguguuugcauuua

SEQ ID NO: 1685 - RNA, 19 nt, Artificial
  Chemically Synthesized
ccaaagagaaaaaccgacu

SEQ ID NO: 1686 - RNA, 19 nt, Artificial
  Chemically Synthesized
ccguuuuaggacaaucagg

SEQ ID NO: 1687 - RNA, 19 nt, Artificial
  Chemically Synthesized
agagaaugugugugcagag

SEQ ID NO: 1688 - RNA, 19 nt, Artificial
  Chemically Synthesized
ucagcuaccugaagcacag

SEQ ID NO: 1689 - RNA, 19 nt, Artificial
  Chemically Synthesized
cucgagcuguauccucaua

SEQ ID NO: 1690 - RNA, 19 nt, Artificial
  Chemically Synthesized
guuguucuguguuugcauu

SEQ ID NO: 1691 - RNA, 19 nt, Artificial
  Chemically Synthesized
gagaaugugugugcagagu

SEQ ID NO: 1692 - RNA, 19 nt, Artificial
  Chemically Synthesized
ugccuuuugugaaggccga

SEQ ID NO: 1693 - RNA, 19 nt, Artificial
  Chemically Synthesized
gaaugugugugcagagucc

SEQ ID NO: 1694 - RNA, 19 nt, Artificial
  Chemically Synthesized
auggcugucagcuaccuga

SEQ ID NO: 1695 - RNA, 19 nt, Artificial
  Chemically Synthesized
cauaggaaacagugaucac

SEQ ID NO: 1696 - RNA, 19 nt, Artificial
  Chemically Synthesized
gggcacgacuuuguacuca

SEQ ID NO: 1697 - RNA, 19 nt, Artificial
  Chemically Synthesized
cgagcuguauccucauagg

SEQ ID NO: 1698 - RNA, 19 nt, Artificial
  Chemically Synthesized
acucgagcuguauccucau

SEQ ID NO: 1699 - RNA, 19 nt, Artificial
  Chemically Synthesized
cuguguuugcauuuaagca

SEQ ID NO: 1700 - RNA, 19 nt, Artificial
  Chemically Synthesized
gaaauugaacucucaguca

SEQ ID NO: 1701 - RNA, 19 nt, Artificial
  Chemically Synthesized
gagcuguauccucauagga

SEQ ID NO: 1702 - RNA, 19 nt, Artificial
  Chemically Synthesized
cgggcacauuugccuuuug

SEQ ID NO: 1703 - RNA, 19 nt, Artificial
  Chemically Synthesized
cccaaagagaaaaaccgac

SEQ ID NO: 1704 - RNA, 19 nt, Artificial
  Chemically Synthesized
uccucauaggaaacaguga

SEQ ID NO: 1705 - RNA, 19 nt, Artificial
  Chemically Synthesized
aagcaagugacuucuggga

SEQ ID NO: 1706 - RNA, 19 nt, Artificial
  Chemically Synthesized
uguguuugcauuuaagcaa

SEQ ID NO: 1707 - RNA, 19 nt, Artificial
  Chemically Synthesized
caucuucugccaagugucu

SEQ ID NO: 1708 - RNA, 19 nt, Artificial
  Chemically Synthesized
ggcacgacuuuguacucag

SEQ ID NO: 1709 - RNA, 19 nt, Artificial
  Chemically Synthesized
gggcacauuugccuuuugu

SEQ ID NO: 1710 - RNA, 19 nt, Artificial
  Chemically Synthesized
uucuguguuugcauuuaag

SEQ ID NO: 1711 - RNA, 19 nt, Artificial
  Chemically Synthesized
ucuucugccaagugucuga

SEQ ID NO: 1712 - RNA, 19 nt, Artificial
  Chemically Synthesized
acauuugccuuuugugaag

SEQ ID NO: 1713 - RNA, 19 nt, Artificial
  Chemically Synthesized
ucaacagcagcaucgagca

SEQ ID NO: 1714 - RNA, 19 nt, Artificial
  Chemically Synthesized
cguuuuaggacaaucaggg

SEQ ID NO: 1715 - RNA, 19 nt, Artificial
  Chemically Synthesized
ccacuaugauccuuaaagg

SEQ ID NO: 1716 - RNA, 19 nt, Artificial
  Chemically Synthesized
ugccguuuuaggacaauca

SEQ ID NO: 1717 - RNA, 19 nt, Artificial
  Chemically Synthesized
gucagcuaccugaagcaca

SEQ ID NO: 1718 - RNA, 19 nt, Artificial
  Chemically Synthesized
aacucgagcuguauccuca

SEQ ID NO: 1719 - RNA, 19 nt, Artificial
  Chemically Synthesized
gcgggcacauuugccuuuu

SEQ ID NO: 1720 - RNA, 19 nt, Artificial
  Chemically Synthesized
accuguagaggacuuucuu

SEQ ID NO: 1721 - RNA, 19 nt, Artificial
  Chemically Synthesized
ccugccguuuuaggacaau

SEQ ID NO: 1722 - RNA, 19 nt, Artificial
  Chemically Synthesized
agucccugccguuuuagga

SEQ ID NO: 1723 - RNA, 19 nt, Artificial
  Chemically Synthesized
cuguagaggacuuucuuca

SEQ ID NO: 1724 - RNA, 19 nt, Artificial
  Chemically Synthesized
cagaaauugaacucucagu

SEQ ID NO: 1725 - RNA, 19 nt, Artificial
  Chemically Synthesized
ccuuaaaggauuccucugu

SEQ ID NO: 1726 - RNA, 19 nt, Artificial
  Chemically Synthesized
caaagagaaaaaccgacug

SEQ ID NO: 1727 - RNA, 19 nt, Artificial
  Chemically Synthesized
cuuuugugaaggccgaacu

SEQ ID NO: 1728 - RNA, 19 nt, Artificial
  Chemically Synthesized
ccauucucagagaaugugu

SEQ ID NO: 1729 - RNA, 19 nt, Artificial
  Chemically Synthesized
ugaagcugcuguaccacuu

SEQ ID NO: 1730 - RNA, 19 nt, Artificial
  Chemically Synthesized
ugauauuuguagugccggg

SEQ ID NO: 1731 - RNA, 19 nt, Artificial
  Chemically Synthesized
uguuugcauuuaagcaagu

SEQ ID NO: 1732 - RNA, 19 nt, Artificial
  Chemically Synthesized
augugugugcagagucccu

SEQ ID NO: 1733 - RNA, 19 nt, Artificial
  Chemically Synthesized
acacgcagaugaagcugcu

SEQ ID NO: 1734 - RNA, 19 nt, Artificial
  Chemically Synthesized
ccaaccuguagaggacuuu

SEQ ID NO: 1735 - RNA, 19 nt, Artificial
  Chemically Synthesized
cccaaccuguagaggacuu

SEQ ID NO: 1736 - RNA, 19 nt, Artificial
  Chemically Synthesized
gacaaucagggcccaucuu

SEQ ID NO: 1737 - RNA, 19 nt, Artificial
  Chemically Synthesized
ucauaggaaacagugauca

SEQ ID NO: 1738 - RNA, 19 nt, Artificial
  Chemically Synthesized
uaugauauuuguagugccg

SEQ ID NO: 1739 - RNA, 19 nt, Artificial
  Chemically Synthesized
ugaagcacagcaaagccuu

SEQ ID NO: 1740 - RNA, 19 nt, Artificial
  Chemically Synthesized
ugggugccuccacuaugau

SEQ ID NO: 1741 - RNA, 19 nt, Artificial
  Chemically Synthesized
guguuugcauuuaagcaag

SEQ ID NO: 1742 - RNA, 19 nt, Artificial
  Chemically Synthesized
ccaucuucugccaaguguc

SEQ ID NO: 1743 - RNA, 19 nt, Artificial
  Chemically Synthesized
ucagaaauugaacucucag

SEQ ID NO: 1744 - RNA, 19 nt, Artificial
  Chemically Synthesized
auggccaaaaggcuccuga

SEQ ID NO: 1745 - RNA, 19 nt, Artificial
  Chemically Synthesized
uauccucauaggaaacagu

SEQ ID NO: 1746 - RNA, 19 nt, Artificial
  Chemically Synthesized
acuuucuucagggcccgua

SEQ ID NO: 1747 - RNA, 19 nt, Artificial
  Chemically Synthesized
ggcacauuugccuuuugug

SEQ ID NO: 1748 - RNA, 19 nt, Artificial
  Chemically Synthesized
caucaacagcagcaucgag

SEQ ID NO: 1749 - RNA, 19 nt, Artificial
  Chemically Synthesized
gcauuuaagcaagugacuu

SEQ ID NO: 1750 - RNA, 19 nt, Artificial
  Chemically Synthesized
uacagcgaaggcuacucgu

SEQ ID NO: 1751 - RNA, 19 nt, Artificial
  Chemically Synthesized
gacuacagcgaaggcuacu

SEQ ID NO: 1752 - RNA, 19 nt, Artificial
  Chemically Synthesized
cccaucuucugccaagugu

SEQ ID NO: 1753 - RNA, 19 nt, Artificial
  Chemically Synthesized
aagccgccauaauaaaauc

SEQ ID NO: 1754 - RNA, 19 nt, Artificial
  Chemically Synthesized
aggauuccucugugugggu

SEQ ID NO: 1755 - RNA, 19 nt, Artificial
  Chemically Synthesized
cuuaaaggauuccucugug

SEQ ID NO: 1756 - RNA, 19 nt, Artificial
  Chemically Synthesized
ucagagaaugugugugcag

SEQ ID NO: 1757 - RNA, 19 nt, Artificial
  Chemically Synthesized
uuaggacaaucagggccca

SEQ ID NO: 1758 - RNA, 19 nt, Artificial
  Chemically Synthesized
gaagcacagcaaagccuuc

SEQ ID NO: 1759 - RNA, 19 nt, Artificial
  Chemically Synthesized
uguacucagaaauugaacu

SEQ ID NO: 1760 - RNA, 19 nt, Artificial
  Chemically Synthesized
cgaacucgagcuguauccu

SEQ ID NO: 1761 - RNA, 19 nt, Artificial
  Chemically Synthesized
agaggacuuucuucagggc

SEQ ID NO: 1762 - RNA, 19 nt, Artificial
  Chemically Synthesized
gugccuccacuaugauccu

SEQ ID NO: 1763 - RNA, 19 nt, Artificial
  Chemically Synthesized
uguagaggacuuucuucag

SEQ ID NO: 1764 - RNA, 19 nt, Artificial
  Chemically Synthesized
ugcauuuaagcaagugacu

SEQ ID NO: 1765 - RNA, 19 nt, Artificial
  Chemically Synthesized
gaaaaaccgacugcggaag

SEQ ID NO: 1766 - RNA, 19 nt, Artificial
  Chemically Synthesized
caaccuguagaggacuuuc

SEQ ID NO: 1767 - RNA, 19 nt, Artificial
  Chemically Synthesized
caagugacuucugggaagu

SEQ ID NO: 1768 - RNA, 19 nt, Artificial
  Chemically Synthesized
guuuuaggacaaucagggc

SEQ ID NO: 1769 - RNA, 19 nt, Artificial
  Chemically Synthesized
gccgccauaauaaaaucug

SEQ ID NO: 1770 - RNA, 19 nt, Artificial
  Chemically Synthesized
aauugaacucucagucacg

SEQ ID NO: 1771 - RNA, 19 nt, Artificial
  Chemically Synthesized
accgcaucaacagcagcau

SEQ ID NO: 1772 - RNA, 19 nt, Artificial
  Chemically Synthesized
uaggacaaucagggcccau

SEQ ID NO: 1773 - RNA, 19 nt, Artificial
  Chemically Synthesized
uaccugaagcacagcaaag

SEQ ID NO: 1774 - RNA, 19 nt, Artificial
  Chemically Synthesized
uuaaaggauuccucugugu

SEQ ID NO: 1775 - RNA, 19 nt, Artificial
  Chemically Synthesized
acauccuggagauggcugu

SEQ ID NO: 1776 - RNA, 19 nt, Artificial
  Chemically Synthesized
ucccugccguuuuaggaca

SEQ ID NO: 1777 - RNA, 19 nt, Artificial
  Chemically Synthesized
cauucucagagaaugugug

SEQ ID NO: 1778 - RNA, 19 nt, Artificial
  Chemically Synthesized
agauggcugucagcuaccu

SEQ ID NO: 1779 - RNA, 19 nt, Artificial
  Chemically Synthesized
caaaaggcuccugagugug

SEQ ID NO: 1780 - RNA, 19 nt, Artificial
  Chemically Synthesized
guagaggacuuucuucagg

SEQ ID NO: 1781 - RNA, 19 nt, Artificial
  Chemically Synthesized
ccuguagaggacuuucuuc

SEQ ID NO: 1782 - RNA, 19 nt, Artificial
  Chemically Synthesized
uuugcauuuaagcaaguga

SEQ ID NO: 1783 - RNA, 19 nt, Artificial
  Chemically Synthesized
agagaaaaaccgacugcgg

SEQ ID NO: 1784 - RNA, 19 nt, Artificial
  Chemically Synthesized
gcagaugaagcugcuguac

SEQ ID NO: 1785 - RNA, 19 nt, Artificial
  Chemically Synthesized
agcacagcaaagccuucgu

SEQ ID NO: 1786 - RNA, 19 nt, Artificial
  Chemically Synthesized
acuuuguacucagaaauug

SEQ ID NO: 1787 - RNA, 19 nt, Artificial
  Chemically Synthesized
gugggcacgacuuuguacu

SEQ ID NO: 1788 - RNA, 19 nt, Artificial
  Chemically Synthesized
gauccuuaaaggauuccuc

SEQ ID NO: 1789 - RNA, 19 nt, Artificial
  Chemically Synthesized
uccacuaugauccuuaaag

SEQ ID NO: 1790 - RNA, 19 nt, Artificial
  Chemically Synthesized
cucauaggaaacagugauc

SEQ ID NO: 1791 - RNA, 19 nt, Artificial
  Chemically Synthesized
cuguauccucauaggaaac

SEQ ID NO: 1792 - RNA, 19 nt, Artificial
  Chemically Synthesized
cagaugaagcugcuguacc

SEQ ID NO: 1793 - RNA, 19 nt, Artificial
  Chemically Synthesized
acuaugauccuuaaaggau

SEQ ID NO: 1794 - RNA, 19 nt, Artificial
  Chemically Synthesized
guauccucauaggaaacag

SEQ ID NO: 1795 - RNA, 19 nt, Artificial
  Chemically Synthesized
aaccuguagaggacuuucu

SEQ ID NO: 1796 - RNA, 19 nt, Artificial
  Chemically Synthesized
agagucccugccguuuuag

SEQ ID NO: 1797 - RNA, 19 nt, Artificial
  Chemically Synthesized
gaagcugcuguaccacuuc

SEQ ID NO: 1798 - RNA, 19 nt, Artificial
  Chemically Synthesized
acgcagaugaagcugcugu

SEQ ID NO: 1799 - RNA, 19 nt, Artificial
  Chemically Synthesized
agccgccauaauaaaaucu

SEQ ID NO: 1800 - RNA, 19 nt, Artificial
  Chemically Synthesized
caacuccaagcuggagaag

SEQ ID NO: 1801 - RNA, 19 nt, Artificial
  Chemically Synthesized
agcuaccugaagcacagca

SEQ ID NO: 1802 - RNA, 19 nt, Artificial
  Chemically Synthesized
auuccucugugugggugga

SEQ ID NO: 1803 - RNA, 19 nt, Artificial
  Chemically Synthesized
uuuugugaaggccgaacuc

SEQ ID NO: 1804 - RNA, 19 nt, Artificial
  Chemically Synthesized
cugaagcacagcaaagccu

SEQ ID NO: 1805 - RNA, 19 nt, Artificial
  Chemically Synthesized
auugaacucucagucacgu

SEQ ID NO: 1806 - RNA, 19 nt, Artificial
  Chemically Synthesized
uuguucuguguuugcauuu

SEQ ID NO: 1807 - RNA, 19 nt, Artificial
  Chemically Synthesized
agaaugugugugcagaguc

SEQ ID NO: 1808 - RNA, 19 nt, Artificial
  Chemically Synthesized
gaugaagcugcuguaccac

SEQ ID NO: 1809 - RNA, 19 nt, Artificial
  Chemically Synthesized
ugugggcacgacuuuguac

SEQ ID NO: 1810 - RNA, 19 nt, Artificial
  Chemically Synthesized
cauuuaagcaagugacuuc

SEQ ID NO: 1811 - RNA, 19 nt, Artificial
  Chemically Synthesized
aaaucugauuguucagccc

SEQ ID NO: 1812 - RNA, 19 nt, Artificial
  Chemically Synthesized
aaauugaacucucagucac

SEQ ID NO: 1813 - RNA, 19 nt, Artificial
  Chemically Synthesized
ccuuuugugaaggccgaac

SEQ ID NO: 1814 - RNA, 19 nt, Artificial
  Chemically Synthesized
acaaucagggcccaucuuc

SEQ ID NO: 1815 - RNA, 19 nt, Artificial
  Chemically Synthesized
cccauucucagagaaugug

SEQ ID NO: 1816 - RNA, 19 nt, Artificial
  Chemically Synthesized
aagagaaaaaccgacugcg

SEQ ID NO: 1817 - RNA, 19 nt, Artificial
  Chemically Synthesized
aaaggauuccucugugugg

SEQ ID NO: 1818 - RNA, 19 nt, Artificial
  Chemically Synthesized
auccuuaaaggauuccucu

SEQ ID NO: 1819 - RNA, 19 nt, Artificial
  Chemically Synthesized
ugccuccacuaugauccuu

SEQ ID NO: 1820 - RNA, 19 nt, Artificial
  Chemically Synthesized
augauauuuguagugccgg

SEQ ID NO: 1821 - RNA, 19 nt, Artificial
  Chemically Synthesized
auuuaagcaagugacuucu

SEQ ID NO: 1822 - RNA, 19 nt, Artificial
  Chemically Synthesized
uuaagcaagugacuucugg

SEQ ID NO: 1823 - RNA, 19 nt, Artificial
  Chemically Synthesized
guuugcauuuaagcaagug

SEQ ID NO: 1824 - RNA, 19 nt, Artificial
  Chemically Synthesized
cugccguuuuaggacaauc

SEQ ID NO: 1825 - RNA, 19 nt, Artificial
  Chemically Synthesized
accugaagcacagcaaagc

SEQ ID NO: 1826 - RNA, 19 nt, Artificial
  Chemically Synthesized
aaaaggcuccugagugugc

SEQ ID NO: 1827 - RNA, 19 nt, Artificial
  Chemically Synthesized
uaagcaagugacuucuggg

SEQ ID NO: 1828 - RNA, 19 nt, Artificial
  Chemically Synthesized
aaucagggcccaucuucug

SEQ ID NO: 1829 - RNA, 19 nt, Artificial
  Chemically Synthesized
acucagaaauugaacucuc

SEQ ID NO: 1830 - RNA, 19 nt, Artificial
  Chemically Synthesized
gaacucgagcuguauccuc

SEQ ID NO: 1831 - RNA, 19 nt, Artificial
  Chemically Synthesized
augaagcugcuguaccacu

SEQ ID NO: 1832 - RNA, 19 nt, Artificial
  Chemically Synthesized
uuguacucagaaauugaac

SEQ ID NO: 1833 - RNA, 19 nt, Artificial
  Chemically Synthesized
ugggcacgacuuuguacuc

SEQ ID NO: 1834 - RNA, 19 nt, Artificial
  Chemically Synthesized
ucuaugauauuuguagugc

SEQ ID NO: 1835 - RNA, 19 nt, Artificial
  Chemically Synthesized
uugcauuuaagcaagugac

SEQ ID NO: 1836 - RNA, 19 nt, Artificial
  Chemically Synthesized
aaagagaaaaaccgacugc

SEQ ID NO: 1837 - RNA, 19 nt, Artificial
  Chemically Synthesized
ucgagcuguauccucauag

SEQ ID NO: 1838 - RNA, 19 nt, Artificial
  Chemically Synthesized
uagaggacuuucuucaggg

SEQ ID NO: 1839 - RNA, 19 nt, Artificial
  Chemically Synthesized
ugucagcuaccugaagcac

SEQ ID NO: 1840 - RNA, 19 nt, Artificial
  Chemically Synthesized
agaaauugaacucucaguc

SEQ ID NO: 1841 - RNA, 19 nt, Artificial
  Chemically Synthesized
ugauccuuaaaggauuccu

SEQ ID NO: 1842 - RNA, 19 nt, Artificial
  Chemically Synthesized
auccuggagauggcuguca

SEQ ID NO: 1843 - RNA, 19 nt, Artificial
  Chemically Synthesized
auucucagagaaugugugu

SEQ ID NO: 1844 - RNA, 19 nt, Artificial
  Chemically Synthesized
uccuuaaaggauuccucug

SEQ ID NO: 1845 - RNA, 19 nt, Artificial
  Chemically Synthesized
uaugauccuuaaaggauuc

SEQ ID NO: 1846 - RNA, 19 nt, Artificial
  Chemically Synthesized
uguauccucauaggaaaca

SEQ ID NO: 1847 - RNA, 19 nt, Artificial
  Chemically Synthesized
ucucagagaaugugugugc

SEQ ID NO: 1848 - RNA, 19 nt, Artificial
  Chemically Synthesized
ugaacucucagucacgugg

SEQ ID NO: 1849 - RNA, 19 nt, Artificial
  Chemically Synthesized
guacucagaaauugaacuc

SEQ ID NO: 1850 - RNA, 19 nt, Artificial
  Chemically Synthesized
aaaaucugauuguucagcc

SEQ ID NO: 1851 - RNA, 19 nt, Artificial
  Chemically Synthesized
aaugugugugcagaguccc

SEQ ID NO: 1852 - RNA, 19 nt, Artificial
  Chemically Synthesized
acuacagcgaaggcuacuc

SEQ ID NO: 1853 - RNA, 19 nt, Artificial
  Chemically Synthesized
aaggauuccucuguguggg

SEQ ID NO: 1854 - RNA, 19 nt, Artificial
  Chemically Synthesized
uaaaggauuccucugugug

SEQ ID NO: 1855 - RNA, 19 nt, Artificial
  Chemically Synthesized
uaggaaacagugaucaccc

SEQ ID NO: 1856 - RNA, 19 nt, Artificial
  Chemically Synthesized
uugccuuuugugaaggccg

SEQ ID NO: 1857 - RNA, 19 nt, Artificial
  Chemically Synthesized
ucuguguuugcauuuaagc

SEQ ID NO: 1858 - RNA, 19 nt, Artificial
  Chemically Synthesized
aaaaaccgacugcggaagc

SEQ ID NO: 1859 - RNA, 19 nt, Artificial
  Chemically Synthesized
aacuccaagcuggagaagg

SEQ ID NO: 1860 - RNA, 19 nt, Artificial
  Chemically Synthesized
cauuugccuuuugugaagg

SEQ ID NO: 1861 - RNA, 19 nt, Artificial
  Chemically Synthesized
acucucagucacguggaag

SEQ ID NO: 1862 - RNA, 19 nt, Artificial
  Chemically Synthesized
uacucagaaauugaacucu

SEQ ID NO: 1863 - RNA, 19 nt, Artificial
  Chemically Synthesized
uuuaagcaagugacuucug

SEQ ID NO: 1864 - RNA, 19 nt, Artificial
  Chemically Synthesized
agugacuucugggaagucc

SEQ ID NO: 1865 - RNA, 19 nt, Artificial
  Chemically Synthesized
aagugacuucugggaaguc

SEQ ID NO: 1866 - RNA, 19 nt, Artificial
  Chemically Synthesized
aagcugcuguaccacuucc

SEQ ID NO: 1867 - RNA, 19 nt, Artificial
  Chemically Synthesized
uuccucuguguggguggau

SEQ ID NO: 1868 - RNA, 19 nt, Artificial
  Chemically Synthesized
auccucauaggaaacagug

SEQ ID NO: 1869 - RNA, 19 nt, Artificial
  Chemically Synthesized
uucucagagaaugugugug

SEQ ID NO: 1870 - RNA, 19 nt, Artificial
  Chemically Synthesized
auaggaaacagugaucacc

SEQ ID NO: 1871 - RNA, 19 nt, Artificial
  Chemically Synthesized
uugaacucucagucacgug

SEQ ID NO: 1872 - RNA, 19 nt, Artificial
  Chemically Synthesized
auuugccuuuugugaaggc

SEQ ID NO: 1873 - RNA, 19 nt, Artificial
  Chemically Synthesized
cuucugccaagugucugac

SEQ ID NO: 1874 - RNA, 19 nt, Artificial
  Chemically Synthesized
aucaacagcagcaucgagc

SEQ ID NO: 1875 - RNA, 19 nt, Artificial
  Chemically Synthesized
aucuucugccaagugucug

SEQ ID NO: 1876 - RNA, 19 nt, Artificial
  Chemically Synthesized
uuuuaggacaaucagggcc

SEQ ID NO: 1877 - RNA, 19 nt, Artificial
  Chemically Synthesized
aagcacagcaaagccuucg

SEQ ID NO: 1878 - RNA, 19 nt, Artificial
  Chemically Synthesized
uucugccaagugucugacc

SEQ ID NO: 1879 - RNA, 19 nt, Artificial
  Chemically Synthesized
uuugugaaggccgaacucg

SEQ ID NO: 1880 - RNA, 19 nt, Artificial
  Chemically Synthesized
uuuaggacaaucagggccc

SEQ ID NO: 1881 - RNA, 19 nt, Artificial
  Chemically Synthesized
uaaaaucugauuguucagc

SEQ ID NO: 1882 - RNA, 19 nt, Artificial
  Chemically Synthesized
uuugccuuuugugaaggcc

SEQ ID NO: 1883 - RNA, 19 nt, Artificial
  Chemically Synthesized
augauccuuaaaggauucc

SEQ ID NO: 1884 - RNA, 19 nt, Artificial
  Chemically Synthesized
uuaaggaucauaguggagg

SEQ ID NO: 1885 - RNA, 19 nt, Artificial
  Chemically Synthesized
uuuccuaugaggauacagc

SEQ ID NO: 1886 - RNA, 19 nt, Artificial
  Chemically Synthesized
uuuauuauggcggcuucgg

SEQ ID NO: 1887 - RNA, 19 nt, Artificial
  Chemically Synthesized
ucagauuuuauuauggcgg

SEQ ID NO: 1888 - RNA, 19 nt, Artificial
  Chemically Synthesized
uuuuauuauggcggcuucg

SEQ ID NO: 1889 - RNA, 19 nt, Artificial
  Chemically Synthesized
uaaaacggcagggacucug

SEQ ID NO: 1890 - RNA, 19 nt, Artificial
  Chemically Synthesized
ugguacagcagcuucaucu

SEQ ID NO: 1891 - RNA, 19 nt, Artificial
  Chemically Synthesized
uuugcugugcuucagguag

SEQ ID NO: 1892 - RNA, 19 nt, Artificial
  Chemically Synthesized
uuucugaguacaaagucgu

SEQ ID NO: 1893 - RNA, 19 nt, Artificial
  Chemically Synthesized
augcaaacacagaacaacc

SEQ ID NO: 1894 - RNA, 19 nt, Artificial
  Chemically Synthesized
uauuauggcggcuucggag

SEQ ID NO: 1895 - RNA, 19 nt, Artificial
  Chemically Synthesized
uucuccagcuuggaguugg

SEQ ID NO: 1896 - RNA, 19 nt, Artificial
  Chemically Synthesized
uuccgcagucgguuuuucu

SEQ ID NO: 1897 - RNA, 19 nt, Artificial
  Chemically Synthesized
uacagcagcuucaucugcg

SEQ ID NO: 1898 - RNA, 19 nt, Artificial
  Chemically Synthesized
ucaauuucugaguacaaag

SEQ ID NO: 1899 - RNA, 19 nt, Artificial
  Chemically Synthesized
uuaaaugcaaacacagaac

SEQ ID NO: 1900 - RNA, 19 nt, Artificial
  Chemically Synthesized
ucugcacacacauucucug

SEQ ID NO: 1901 - RNA, 19 nt, Artificial
  Chemically Synthesized
ucugaguacaaagucgugc

SEQ ID NO: 1902 - RNA, 19 nt, Artificial
  Chemically Synthesized
cuacaaauaucauagaacc

SEQ ID NO: 1903 - RNA, 19 nt, Artificial
  Chemically Synthesized
uugcugugcuucagguagc

SEQ ID NO: 1904 - RNA, 19 nt, Artificial
  Chemically Synthesized
uuccacgugacugagaguu

SEQ ID NO: 1905 - RNA, 19 nt, Artificial
  Chemically Synthesized
auuucugaguacaaagucg

SEQ ID NO: 1906 - RNA, 19 nt, Artificial
  Chemically Synthesized
acacucaggagccuuuugg

SEQ ID NO: 1907 - RNA, 19 nt, Artificial
  Chemically Synthesized
agaagaugggcccugauug

SEQ ID NO: 1908 - RNA, 19 nt, Artificial
  Chemically Synthesized
aucagauuuuauuauggcg

SEQ ID NO: 1909 - RNA, 19 nt, Artificial
  Chemically Synthesized
uacaaauaucauagaaccc

SEQ ID NO: 1910 - RNA, 19 nt, Artificial
  Chemically Synthesized
uagcugacagccaucucca

SEQ ID NO: 1911 - RNA, 19 nt, Artificial
  Chemically Synthesized
uucugaguacaaagucgug

SEQ ID NO: 1912 - RNA, 19 nt, Artificial
  Chemically Synthesized
aucacuguuuccuaugagg

SEQ ID NO: 1913 - RNA, 19 nt, Artificial
  Chemically Synthesized
ugcaaacacagaacaaccc

SEQ ID NO: 1914 - RNA, 19 nt, Artificial
  Chemically Synthesized
uacaaagucgugcccacac

SEQ ID NO: 1915 - RNA, 19 nt, Artificial
  Chemically Synthesized
auuuuauuauggcggcuuc

SEQ ID NO: 1916 - RNA, 19 nt, Artificial
  Chemically Synthesized
uuuaaggaucauaguggag

SEQ ID NO: 1917 - RNA, 19 nt, Artificial
  Chemically Synthesized
uccgcagucgguuuuucuc

SEQ ID NO: 1918 - RNA, 19 nt, Artificial
  Chemically Synthesized
ugagaguucaauuucugag

SEQ ID NO: 1919 - RNA, 19 nt, Artificial
  Chemically Synthesized
aauccuuuaaggaucauag

SEQ ID NO: 1920 - RNA, 19 nt, Artificial
  Chemically Synthesized
uuccuaugaggauacagcu

SEQ ID NO: 1921 - RNA, 19 nt, Artificial
  Chemically Synthesized
ucgaugcugcuguugaugc

SEQ ID NO: 1922 - RNA, 19 nt, Artificial
  Chemically Synthesized
uuguccuaaaacggcaggg

SEQ ID NO: 1923 - RNA, 19 nt, Artificial
  Chemically Synthesized
uucggccuucacaaaaggc

SEQ ID NO: 1924 - RNA, 19 nt, Artificial
  Chemically Synthesized
ggcacuacaaauaucauag

SEQ ID NO: 1925 - RNA, 19 nt, Artificial
  Chemically Synthesized
uagccuucgcuguaguccu

SEQ ID NO: 1926 - RNA, 19 nt, Artificial
  Chemically Synthesized
uuauuauggcggcuucgga

SEQ ID NO: 1927 - RNA, 19 nt, Artificial
  Chemically Synthesized
uaaggaucauaguggaggc

SEQ ID NO: 1928 - RNA, 19 nt, Artificial
  Chemically Synthesized
uccacgugacugagaguuc

SEQ ID NO: 1929 - RNA, 19 nt, Artificial
  Chemically Synthesized
ucacaaaaggcaaaugugc

SEQ ID NO: 1930 - RNA, 19 nt, Artificial
  Chemically Synthesized
uucccagaagucacuugcu

SEQ ID NO: 1931 - RNA, 19 nt, Artificial
  Chemically Synthesized
ugcuucagguagcugacag

SEQ ID NO: 1932 - RNA, 19 nt, Artificial
  Chemically Synthesized
uucagguagcugacagcca

SEQ ID NO: 1933 - RNA, 19 nt, Artificial
  Chemically Synthesized
uucacaaaaggcaaaugug

SEQ ID NO: 1934 - RNA, 19 nt, Artificial
  Chemically Synthesized
cugauuguccuaaaacggc

SEQ ID NO: 1935 - RNA, 19 nt, Artificial
  Chemically Synthesized
ugcacacacauucucugag

SEQ ID NO: 1936 - RNA, 19 nt, Artificial
  Chemically Synthesized
aauuucugaguacaaaguc

SEQ ID NO: 1937 - RNA, 19 nt, Artificial
  Chemically Synthesized
uccuuuaaggaucauagug

SEQ ID NO: 1938 - RNA, 19 nt, Artificial
  Chemically Synthesized
ucgaguucggccuucacaa

SEQ ID NO: 1939 - RNA, 19 nt, Artificial
  Chemically Synthesized
uggaagugguacagcagcu

SEQ ID NO: 1940 - RNA, 19 nt, Artificial
  Chemically Synthesized
cuucccagaagucacuugc

SEQ ID NO: 1941 - RNA, 19 nt, Artificial
  Chemically Synthesized
uaaaugcaaacacagaaca

SEQ ID NO: 1942 - RNA, 19 nt, Artificial
  Chemically Synthesized
agucgguuuuucucuuugg

SEQ ID NO: 1943 - RNA, 19 nt, Artificial
  Chemically Synthesized
ccugauuguccuaaaacgg

SEQ ID NO: 1944 - RNA, 19 nt, Artificial
  Chemically Synthesized
cucugcacacacauucucu

SEQ ID NO: 1945 - RNA, 19 nt, Artificial
  Chemically Synthesized
cugugcuucagguagcuga

SEQ ID NO: 1946 - RNA, 19 nt, Artificial
  Chemically Synthesized
uaugaggauacagcucgag

SEQ ID NO: 1947 - RNA, 19 nt, Artificial
  Chemically Synthesized
aaugcaaacacagaacaac

SEQ ID NO: 1948 - RNA, 19 nt, Artificial
  Chemically Synthesized
acucugcacacacauucuc

SEQ ID NO: 1949 - RNA, 19 nt, Artificial
  Chemically Synthesized
ucggccuucacaaaaggca

SEQ ID NO: 1950 - RNA, 19 nt, Artificial
  Chemically Synthesized
ggacucugcacacacauuc

SEQ ID NO: 1951 - RNA, 19 nt, Artificial
  Chemically Synthesized
ucagguagcugacagccau

SEQ ID NO: 1952 - RNA, 19 nt, Artificial
  Chemically Synthesized
gugaucacuguuuccuaug

SEQ ID NO: 1953 - RNA, 19 nt, Artificial
  Chemically Synthesized
ugaguacaaagucgugccc

SEQ ID NO: 1954 - RNA, 19 nt, Artificial
  Chemically Synthesized
ccuaugaggauacagcucg

SEQ ID NO: 1955 - RNA, 19 nt, Artificial
  Chemically Synthesized
augaggauacagcucgagu

SEQ ID NO: 1956 - RNA, 19 nt, Artificial
  Chemically Synthesized
ugcuuaaaugcaaacacag

SEQ ID NO: 1957 - RNA, 19 nt, Artificial
  Chemically Synthesized
ugacugagaguucaauuuc

SEQ ID NO: 1958 - RNA, 19 nt, Artificial
  Chemically Synthesized
uccuaugaggauacagcuc

SEQ ID NO: 1959 - RNA, 19 nt, Artificial
  Chemically Synthesized
caaaaggcaaaugugcccg

SEQ ID NO: 1960 - RNA, 19 nt, Artificial
  Chemically Synthesized
gucgguuuuucucuuuggg

SEQ ID NO: 1961 - RNA, 19 nt, Artificial
  Chemically Synthesized
ucacuguuuccuaugagga

SEQ ID NO: 1962 - RNA, 19 nt, Artificial
  Chemically Synthesized
ucccagaagucacuugcuu

SEQ ID NO: 1963 - RNA, 19 nt, Artificial
  Chemically Synthesized
uugcuuaaaugcaaacaca

SEQ ID NO: 1964 - RNA, 19 nt, Artificial
  Chemically Synthesized
agacacuuggcagaagaug

SEQ ID NO: 1965 - RNA, 19 nt, Artificial
  Chemically Synthesized
cugaguacaaagucgugcc

SEQ ID NO: 1966 - RNA, 19 nt, Artificial
  Chemically Synthesized
acaaaaggcaaaugugccc

SEQ ID NO: 1967 - RNA, 19 nt, Artificial
  Chemically Synthesized
cuuaaaugcaaacacagaa

SEQ ID NO: 1968 - RNA, 19 nt, Artificial
  Chemically Synthesized
ucagacacuuggcagaaga

SEQ ID NO: 1969 - RNA, 19 nt, Artificial
  Chemically Synthesized
cuucacaaaaggcaaaugu

SEQ ID NO: 1970 - RNA, 19 nt, Artificial
  Chemically Synthesized
ugcucgaugcugcuguuga

SEQ ID NO: 1971 - RNA, 19 nt, Artificial
  Chemically Synthesized
cccugauuguccuaaaacg

SEQ ID NO: 1972 - RNA, 19 nt, Artificial
  Chemically Synthesized
ccuuuaaggaucauagugg

SEQ ID NO: 1973 - RNA, 19 nt, Artificial
  Chemically Synthesized
ugauuguccuaaaacggca

SEQ ID NO: 1974 - RNA, 19 nt, Artificial
  Chemically Synthesized
ugugcuucagguagcugac

SEQ ID NO: 1975 - RNA, 19 nt, Artificial
  Chemically Synthesized
ugaggauacagcucgaguu

SEQ ID NO: 1976 - RNA, 19 nt, Artificial
  Chemically Synthesized
aaaaggcaaaugugcccgc

SEQ ID NO: 1977 - RNA, 19 nt, Artificial
  Chemically Synthesized
aagaaaguccucuacaggu

SEQ ID NO: 1978 - RNA, 19 nt, Artificial
  Chemically Synthesized
auuguccuaaaacggcagg

SEQ ID NO: 1979 - RNA, 19 nt, Artificial
  Chemically Synthesized
uccuaaaacggcagggacu

SEQ ID NO: 1980 - RNA, 19 nt, Artificial
  Chemically Synthesized
ugaagaaaguccucuacag

SEQ ID NO: 1981 - RNA, 19 nt, Artificial
  Chemically Synthesized
acugagaguucaauuucug

SEQ ID NO: 1982 - RNA, 19 nt, Artificial
  Chemically Synthesized
acagaggaauccuuuaagg

SEQ ID NO: 1983 - RNA, 19 nt, Artificial
  Chemically Synthesized
cagucgguuuuucucuuug

SEQ ID NO: 1984 - RNA, 19 nt, Artificial
  Chemically Synthesized
aguucggccuucacaaaag

SEQ ID NO: 1985 - RNA, 19 nt, Artificial
  Chemically Synthesized
acacauucucugagaaugg

SEQ ID NO: 1986 - RNA, 19 nt, Artificial
  Chemically Synthesized
aagugguacagcagcuuca

SEQ ID NO: 1987 - RNA, 19 nt, Artificial
  Chemically Synthesized
cccggcacuacaaauauca

SEQ ID NO: 1988 - RNA, 19 nt, Artificial
  Chemically Synthesized
acuugcuuaaaugcaaaca

SEQ ID NO: 1989 - RNA, 19 nt, Artificial
  Chemically Synthesized
agggacucugcacacacau

SEQ ID NO: 1990 - RNA, 19 nt, Artificial
  Chemically Synthesized
agcagcuucaucugcgugu

SEQ ID NO: 1991 - RNA, 19 nt, Artificial
  Chemically Synthesized
aaaguccucuacagguugg

SEQ ID NO: 1992 - RNA, 19 nt, Artificial
  Chemically Synthesized
aaguccucuacagguuggg

SEQ ID NO: 1993 - RNA, 19 nt, Artificial
  Chemically Synthesized
aagaugggcccugauuguc

SEQ ID NO: 1994 - RNA, 19 nt, Artificial
  Chemically Synthesized
ugaucacuguuuccuauga

SEQ ID NO: 1995 - RNA, 19 nt, Artificial
  Chemically Synthesized
cggcacuacaaauaucaua

SEQ ID NO: 1996 - RNA, 19 nt, Artificial
  Chemically Synthesized
aaggcuuugcugugcuuca

SEQ ID NO: 1997 - RNA, 19 nt, Artificial
  Chemically Synthesized
aucauaguggaggcaccca

SEQ ID NO: 1998 - RNA, 19 nt, Artificial
  Chemically Synthesized
cuugcuuaaaugcaaacac

SEQ ID NO: 1999 - RNA, 19 nt, Artificial
  Chemically Synthesized
gacacuuggcagaagaugg

SEQ ID NO: 2000 - RNA, 19 nt, Artificial
  Chemically Synthesized
cugagaguucaauuucuga

SEQ ID NO: 2001 - RNA, 19 nt, Artificial
  Chemically Synthesized
ucaggagccuuuuggccau

SEQ ID NO: 2002 - RNA, 19 nt, Artificial
  Chemically Synthesized
acuguuuccuaugaggaua

SEQ ID NO: 2003 - RNA, 19 nt, Artificial
  Chemically Synthesized
uacgggcccugaagaaagu

SEQ ID NO: 2004 - RNA, 19 nt, Artificial
  Chemically Synthesized
cacaaaaggcaaaugugcc

SEQ ID NO: 2005 - RNA, 19 nt, Artificial
  Chemically Synthesized
cucgaugcugcuguugaug

SEQ ID NO: 2006 - RNA, 19 nt, Artificial
  Chemically Synthesized
aagucacuugcuuaaaugc

SEQ ID NO: 2007 - RNA, 19 nt, Artificial
  Chemically Synthesized
acgaguagccuucgcugua

SEQ ID NO: 2008 - RNA, 19 nt, Artificial
  Chemically Synthesized
aguagccuucgcuguaguc

SEQ ID NO: 2009 - RNA, 19 nt, Artificial
  Chemically Synthesized
acacuuggcagaagauggg

SEQ ID NO: 2010 - RNA, 19 nt, Artificial
  Chemically Synthesized
gauuuuauuauggcggcuu

SEQ ID NO: 2011 - RNA, 19 nt, Artificial
  Chemically Synthesized
acccacacagaggaauccu

SEQ ID NO: 2012 - RNA, 19 nt, Artificial
  Chemically Synthesized
cacagaggaauccuuuaag

SEQ ID NO: 2013 - RNA, 19 nt, Artificial
  Chemically Synthesized
cugcacacacauucucuga

SEQ ID NO: 2014 - RNA, 19 nt, Artificial
  Chemically Synthesized
ugggcccugauuguccuaa

SEQ ID NO: 2015 - RNA, 19 nt, Artificial
  Chemically Synthesized
gaaggcuuugcugugcuuc

SEQ ID NO: 2016 - RNA, 19 nt, Artificial
  Chemically Synthesized
aguucaauuucugaguaca

SEQ ID NO: 2017 - RNA, 19 nt, Artificial
  Chemically Synthesized
aggauacagcucgaguucg

SEQ ID NO: 2018 - RNA, 19 nt, Artificial
  Chemically Synthesized
gcccugaagaaaguccucu

SEQ ID NO: 2019 - RNA, 19 nt, Artificial
  Chemically Synthesized
aggaucauaguggaggcac

SEQ ID NO: 2020 - RNA, 19 nt, Artificial
  Chemically Synthesized
cugaagaaaguccucuaca

SEQ ID NO: 2021 - RNA, 19 nt, Artificial
  Chemically Synthesized
agucacuugcuuaaaugca

SEQ ID NO: 2022 - RNA, 19 nt, Artificial
  Chemically Synthesized
cuuccgcagucgguuuuuc

SEQ ID NO: 2023 - RNA, 19 nt, Artificial
  Chemically Synthesized
gaaaguccucuacagguug

SEQ ID NO: 2024 - RNA, 19 nt, Artificial
  Chemically Synthesized
acuucccagaagucacuug

SEQ ID NO: 2025 - RNA, 19 nt, Artificial
  Chemically Synthesized
gcccugauuguccuaaaac

SEQ ID NO: 2026 - RNA, 19 nt, Artificial
  Chemically Synthesized
cagauuuuauuauggcggc

SEQ ID NO: 2027 - RNA, 19 nt, Artificial
  Chemically Synthesized
cgugacugagaguucaauu

SEQ ID NO: 2028 - RNA, 19 nt, Artificial
  Chemically Synthesized
augcugcuguugaugcggu

SEQ ID NO: 2029 - RNA, 19 nt, Artificial
  Chemically Synthesized
augggcccugauuguccua

SEQ ID NO: 2030 - RNA, 19 nt, Artificial
  Chemically Synthesized
cuuugcugugcuucaggua

SEQ ID NO: 2031 - RNA, 19 nt, Artificial
  Chemically Synthesized
acacagaggaauccuuuaa

SEQ ID NO: 2032 - RNA, 19 nt, Artificial
  Chemically Synthesized
acagccaucuccaggaugu

SEQ ID NO: 2033 - RNA, 19 nt, Artificial
  Chemically Synthesized
uguccuaaaacggcaggga

SEQ ID NO: 2034 - RNA, 19 nt, Artificial
  Chemically Synthesized
cacacauucucugagaaug

SEQ ID NO: 2035 - RNA, 19 nt, Artificial
  Chemically Synthesized
agguagcugacagccaucu

SEQ ID NO: 2036 - RNA, 19 nt, Artificial
  Chemically Synthesized
cacacucaggagccuuuug

SEQ ID NO: 2037 - RNA, 19 nt, Artificial
  Chemically Synthesized
ccugaagaaaguccucuac

SEQ ID NO: 2038 - RNA, 19 nt, Artificial
  Chemically Synthesized
gaagaaaguccucuacagg

SEQ ID NO: 2039 - RNA, 19 nt, Artificial
  Chemically Synthesized
ucacuugcuuaaaugcaaa

SEQ ID NO: 2040 - RNA, 19 nt, Artificial
  Chemically Synthesized
ccgcagucgguuuuucucu

SEQ ID NO: 2041 - RNA, 19 nt, Artificial
  Chemically Synthesized
guacagcagcuucaucugc

SEQ ID NO: 2042 - RNA, 19 nt, Artificial
  Chemically Synthesized
acgaaggcuuugcugugcu

SEQ ID NO: 2043 - RNA, 19 nt, Artificial
  Chemically Synthesized
caauuucugaguacaaagu

SEQ ID NO: 2044 - RNA, 19 nt, Artificial
  Chemically Synthesized
aguacaaagucgugcccac

SEQ ID NO: 2045 - RNA, 19 nt, Artificial
  Chemically Synthesized
gaggaauccuuuaaggauc

SEQ ID NO: 2046 - RNA, 19 nt, Artificial
  Chemically Synthesized
cuuuaaggaucauagugga

SEQ ID NO: 2047 - RNA, 19 nt, Artificial
  Chemically Synthesized
gaucacuguuuccuaugag

SEQ ID NO: 2048 - RNA, 19 nt, Artificial
  Chemically Synthesized
guuuccuaugaggauacag

SEQ ID NO: 2049 - RNA, 19 nt, Artificial
  Chemically Synthesized
gguacagcagcuucaucug

SEQ ID NO: 2050 - RNA, 19 nt, Artificial
  Chemically Synthesized
auccuuuaaggaucauagu

SEQ ID NO: 2051 - RNA, 19 nt, Artificial
  Chemically Synthesized
cuguuuccuaugaggauac

SEQ ID NO: 2052 - RNA, 19 nt, Artificial
  Chemically Synthesized
agaaaguccucuacagguu

SEQ ID NO: 2053 - RNA, 19 nt, Artificial
  Chemically Synthesized
cuaaaacggcagggacucu

SEQ ID NO: 2054 - RNA, 19 nt, Artificial
  Chemically Synthesized
gaagugguacagcagcuuc

SEQ ID NO: 2055 - RNA, 19 nt, Artificial
  Chemically Synthesized
acagcagcuucaucugcgu

SEQ ID NO: 2056 - RNA, 19 nt, Artificial
  Chemically Synthesized
agauuuuauuauggcggcu

SEQ ID NO: 2057 - RNA, 19 nt, Artificial
  Chemically Synthesized
cuucuccagcuuggaguug

SEQ ID NO: 2058 - RNA, 19 nt, Artificial
  Chemically Synthesized
ugcugugcuucagguagcu

SEQ ID NO: 2059 - RNA, 19 nt, Artificial
  Chemically Synthesized
uccacccacacagaggaau

SEQ ID NO: 2060 - RNA, 19 nt, Artificial
  Chemically Synthesized
gaguucggccuucacaaaa

SEQ ID NO: 2061 - RNA, 19 nt, Artificial
  Chemically Synthesized
aggcuuugcugugcuucag

SEQ ID NO: 2062 - RNA, 19 nt, Artificial
  Chemically Synthesized
acgugacugagaguucaau

SEQ ID NO: 2063 - RNA, 19 nt, Artificial
  Chemically Synthesized
aaaugcaaacacagaacaa

SEQ ID NO: 2064 - RNA, 19 nt, Artificial
  Chemically Synthesized
gacucugcacacacauucu

SEQ ID NO: 2065 - RNA, 19 nt, Artificial
  Chemically Synthesized
gugguacagcagcuucauc

SEQ ID NO: 2066 - RNA, 19 nt, Artificial
  Chemically Synthesized
guacaaagucgugcccaca

SEQ ID NO: 2067 - RNA, 19 nt, Artificial
  Chemically Synthesized
gaagucacuugcuuaaaug

SEQ ID NO: 2068 - RNA, 19 nt, Artificial
  Chemically Synthesized
gggcugaacaaucagauuu

SEQ ID NO: 2069 - RNA, 19 nt, Artificial
  Chemically Synthesized
gugacugagaguucaauuu

SEQ ID NO: 2070 - RNA, 19 nt, Artificial
  Chemically Synthesized
guucggccuucacaaaagg

SEQ ID NO: 2071 - RNA, 19 nt, Artificial
  Chemically Synthesized
gaagaugggcccugauugu

SEQ ID NO: 2072 - RNA, 19 nt, Artificial
  Chemically Synthesized
cacauucucugagaauggg

SEQ ID NO: 2073 - RNA, 19 nt, Artificial
  Chemically Synthesized
cgcagucgguuuuucucuu

SEQ ID NO: 2074 - RNA, 19 nt, Artificial
  Chemically Synthesized
ccacacagaggaauccuuu

SEQ ID NO: 2075 - RNA, 19 nt, Artificial
  Chemically Synthesized
agaggaauccuuuaaggau

SEQ ID NO: 2076 - RNA, 19 nt, Artificial
  Chemically Synthesized
aaggaucauaguggaggca

SEQ ID NO: 2077 - RNA, 19 nt, Artificial
  Chemically Synthesized
ccggcacuacaaauaucau

SEQ ID NO: 2078 - RNA, 19 nt, Artificial
  Chemically Synthesized
agaagucacuugcuuaaau

SEQ ID NO: 2079 - RNA, 19 nt, Artificial
  Chemically Synthesized
ccagaagucacuugcuuaa

SEQ ID NO: 2080 - RNA, 19 nt, Artificial
  Chemically Synthesized
cacuugcuuaaaugcaaac

SEQ ID NO: 2081 - RNA, 19 nt, Artificial
  Chemically Synthesized
gauuguccuaaaacggcag

SEQ ID NO: 2082 - RNA, 19 nt, Artificial
  Chemically Synthesized
gcuuugcugugcuucaggu

SEQ ID NO: 2083 - RNA, 19 nt, Artificial
  Chemically Synthesized
gcacacucaggagccuuuu

SEQ ID NO: 2084 - RNA, 19 nt, Artificial
  Chemically Synthesized
cccagaagucacuugcuua

SEQ ID NO: 2085 - RNA, 19 nt, Artificial
  Chemically Synthesized
cagaagaugggcccugauu

SEQ ID NO: 2086 - RNA, 19 nt, Artificial
  Chemically Synthesized
gagaguucaauuucugagu

SEQ ID NO: 2087 - RNA, 19 nt, Artificial
  Chemically Synthesized
gaggauacagcucgaguuc

SEQ ID NO: 2088 - RNA, 19 nt, Artificial
  Chemically Synthesized
agugguacagcagcuucau

SEQ ID NO: 2089 - RNA, 19 nt, Artificial
  Chemically Synthesized
guucaauuucugaguacaa

SEQ ID NO: 2090 - RNA, 19 nt, Artificial
  Chemically Synthesized
gaguacaaagucgugccca

SEQ ID NO: 2091 - RNA, 19 nt, Artificial
  Chemically Synthesized
gcacuacaaauaucauaga

SEQ ID NO: 2092 - RNA, 19 nt, Artificial
  Chemically Synthesized
gucacuugcuuaaaugcaa

SEQ ID NO: 2093 - RNA, 19 nt, Artificial
  Chemically Synthesized
gcagucgguuuuucucuuu

SEQ ID NO: 2094 - RNA, 19 nt, Artificial
  Chemically Synthesized
cuaugaggauacagcucga

SEQ ID NO: 2095 - RNA, 19 nt, Artificial
  Chemically Synthesized
cccugaagaaaguccucua

SEQ ID NO: 2096 - RNA, 19 nt, Artificial
  Chemically Synthesized
gugcuucagguagcugaca

SEQ ID NO: 2097 - RNA, 19 nt, Artificial
  Chemically Synthesized
gacugagaguucaauuucu

SEQ ID NO: 2098 - RNA, 19 nt, Artificial
  Chemically Synthesized
aggaauccuuuaaggauca

SEQ ID NO: 2099 - RNA, 19 nt, Artificial
  Chemically Synthesized
ugacagccaucuccaggau

SEQ ID NO: 2100 - RNA, 19 nt, Artificial
  Chemically Synthesized
acacacauucucugagaau

SEQ ID NO: 2101 - RNA, 19 nt, Artificial
  Chemically Synthesized
cagaggaauccuuuaagga

SEQ ID NO: 2102 - RNA, 19 nt, Artificial
  Chemically Synthesized
gaauccuuuaaggaucaua

SEQ ID NO: 2103 - RNA, 19 nt, Artificial
  Chemically Synthesized
uguuuccuaugaggauaca

SEQ ID NO: 2104 - RNA, 19 nt, Artificial
  Chemically Synthesized
gcacacacauucucugaga

SEQ ID NO: 2105 - RNA, 19 nt, Artificial
  Chemically Synthesized
ccacgugacugagaguuca

SEQ ID NO: 2106 - RNA, 19 nt, Artificial
  Chemically Synthesized
gaguucaauuucugaguac

SEQ ID NO: 2107 - RNA, 19 nt, Artificial
  Chemically Synthesized
ggcugaacaaucagauuuu

SEQ ID NO: 2108 - RNA, 19 nt, Artificial
  Chemically Synthesized
gggacucugcacacacauu

SEQ ID NO: 2109 - RNA, 19 nt, Artificial
  Chemically Synthesized
gaguagccuucgcuguagu

SEQ ID NO: 2110 - RNA, 19 nt, Artificial
  Chemically Synthesized
cccacacagaggaauccuu

SEQ ID NO: 2111 - RNA, 19 nt, Artificial
  Chemically Synthesized
cacacagaggaauccuuua

SEQ ID NO: 2112 - RNA, 19 nt, Artificial
  Chemically Synthesized
gggugaucacuguuuccua

SEQ ID NO: 2113 - RNA, 19 nt, Artificial
  Chemically Synthesized
cggccuucacaaaaggcaa

SEQ ID NO: 2114 - RNA, 19 nt, Artificial
  Chemically Synthesized
gcuuaaaugcaaacacaga

SEQ ID NO: 2115 - RNA, 19 nt, Artificial
  Chemically Synthesized
gcuuccgcagucgguuuuu

SEQ ID NO: 2116 - RNA, 19 nt, Artificial
  Chemically Synthesized
ccuucuccagcuuggaguu

SEQ ID NO: 2117 - RNA, 19 nt, Artificial
  Chemically Synthesized
ccuucacaaaaggcaaaug

SEQ ID NO: 2118 - RNA, 19 nt, Artificial
  Chemically Synthesized
cuuccacgugacugagagu

SEQ ID NO: 2119 - RNA, 19 nt, Artificial
  Chemically Synthesized
agaguucaauuucugagua

SEQ ID NO: 2120 - RNA, 19 nt, Artificial
  Chemically Synthesized
cagaagucacuugcuuaaa

SEQ ID NO: 2121 - RNA, 19 nt, Artificial
  Chemically Synthesized
ggacuucccagaagucacu

SEQ ID NO: 2122 - RNA, 19 nt, Artificial
  Chemically Synthesized
gacuucccagaagucacuu

SEQ ID NO: 2123 - RNA, 19 nt, Artificial
  Chemically Synthesized
ggaagugguacagcagcuu

SEQ ID NO: 2124 - RNA, 19 nt, Artificial
  Chemically Synthesized
auccacccacacagaggaa

SEQ ID NO: 2125 - RNA, 19 nt, Artificial
  Chemically Synthesized
cacuguuuccuaugaggau

SEQ ID NO: 2126 - RNA, 19 nt, Artificial
  Chemically Synthesized
cacacacauucucugagaa

SEQ ID NO: 2127 - RNA, 19 nt, Artificial
  Chemically Synthesized
ggugaucacuguuuccuau

SEQ ID NO: 2128 - RNA, 19 nt, Artificial
  Chemically Synthesized
cacgugacugagaguucaa

SEQ ID NO: 2129 - RNA, 19 nt, Artificial
  Chemically Synthesized
gccuucacaaaaggcaaau

SEQ ID NO: 2130 - RNA, 19 nt, Artificial
  Chemically Synthesized
gucagacacuuggcagaag

SEQ ID NO: 2131 - RNA, 19 nt, Artificial
  Chemically Synthesized
gcucgaugcugcuguugau

SEQ ID NO: 2132 - RNA, 19 nt, Artificial
  Chemically Synthesized
cagacacuuggcagaagau

SEQ ID NO: 2133 - RNA, 19 nt, Artificial
  Chemically Synthesized
ggcccugauuguccuaaaa

SEQ ID NO: 2134 - RNA, 19 nt, Artificial
  Chemically Synthesized
cgaaggcuuugcugugcuu

SEQ ID NO: 2135 - RNA, 19 nt, Artificial
  Chemically Synthesized
ggucagacacuuggcagaa

SEQ ID NO: 2136 - RNA, 19 nt, Artificial
  Chemically Synthesized
cgaguucggccuucacaaa

SEQ ID NO: 2137 - RNA, 19 nt, Artificial
  Chemically Synthesized
gggcccugauuguccuaaa

SEQ ID NO: 2138 - RNA, 19 nt, Artificial
  Chemically Synthesized
gcugaacaaucagauuuua

SEQ ID NO: 2139 - RNA, 19 nt, Artificial
  Chemically Synthesized
ggccuucacaaaaggcaaa

SEQ ID NO: 2140 - RNA, 19 nt, Artificial
  Chemically Synthesized
ggaauccuuuaaggaucau

SEQ ID NO: 2141 - RNA, 19 nt, Artificial
  Chemically Synthesized
caaugaucaccgacugaaa

SEQ ID NO: 2142 - RNA, 19 nt, Artificial
  Chemically Synthesized
cggaucugagggagaacaa

SEQ ID NO: 2143 - RNA, 19 nt, Artificial
  Chemically Synthesized
agguaaacgugcugcucua

SEQ ID NO: 2144 - RNA, 19 nt, Artificial
  Chemically Synthesized
uggacgagcagcagguaaa

SEQ ID NO: 2145 - RNA, 19 nt, Artificial
  Chemically Synthesized
gcugaacucggaauccgaa

SEQ ID NO: 2146 - RNA, 19 nt, Artificial
  Chemically Synthesized
guuggagcugaacucggaa

SEQ ID NO: 2147 - RNA, 19 nt, Artificial
  Chemically Synthesized
cguucuuaacuguuccauu

SEQ ID NO: 2148 - RNA, 19 nt, Artificial
  Chemically Synthesized
aguuggagcugaacucgga

SEQ ID NO: 2149 - RNA, 19 nt, Artificial
  Chemically Synthesized
aaugaucaccgacugaaaa

SEQ ID NO: 2150 - RNA, 19 nt, Artificial
  Chemically Synthesized
gagggagaacaagaccgau

SEQ ID NO: 2151 - RNA, 19 nt, Artificial
  Chemically Synthesized
gaucugagggagaacaaga

SEQ ID NO: 2152 - RNA, 19 nt, Artificial
  Chemically Synthesized
cagucgccaagaaucauga

SEQ ID NO: 2153 - RNA, 19 nt, Artificial
  Chemically Synthesized
agucgccaagaaucaugaa

SEQ ID NO: 2154 - RNA, 19 nt, Artificial
  Chemically Synthesized
ggaucugagggagaacaag

SEQ ID NO: 2155 - RNA, 19 nt, Artificial
  Chemically Synthesized
acuacaucagggaccuuca

SEQ ID NO: 2156 - RNA, 19 nt, Artificial
  Chemically Synthesized
ugcugcucuacgacaugaa

SEQ ID NO: 2157 - RNA, 19 nt, Artificial
  Chemically Synthesized
ugagggagaacaagaccga

SEQ ID NO: 2158 - RNA, 19 nt, Artificial
  Chemically Synthesized
gcuuccaccucauuuuuuu

SEQ ID NO: 2159 - RNA, 19 nt, Artificial
  Chemically Synthesized
cgcaucuugugucgcugaa

SEQ ID NO: 2160 - RNA, 19 nt, Artificial
  Chemically Synthesized
agcugaacucggaauccga

SEQ ID NO: 2161 - RNA, 19 nt, Artificial
  Chemically Synthesized
gggcuguuuuuuuguuauu

SEQ ID NO: 2162 - RNA, 19 nt, Artificial
  Chemically Synthesized
agguggagauucuccagca

SEQ ID NO: 2163 - RNA, 19 nt, Artificial
  Chemically Synthesized
gcaagguggagauucucca

SEQ ID NO: 2164 - RNA, 19 nt, Artificial
  Chemically Synthesized
aggugagcaagguggagau

SEQ ID NO: 2165 - RNA, 19 nt, Artificial
  Chemically Synthesized
gccagucgccaagaaucau

SEQ ID NO: 2166 - RNA, 19 nt, Artificial
  Chemically Synthesized
acguuuggugcuucucaga

SEQ ID NO: 2167 - RNA, 19 nt, Artificial
  Chemically Synthesized
cacguuuggugcuucucag

SEQ ID NO: 2168 - RNA, 19 nt, Artificial
  Chemically Synthesized
cucggaauccgaaguugga

SEQ ID NO: 2169 - RNA, 19 nt, Artificial
  Chemically Synthesized
auauuacaaugaucaccga

SEQ ID NO: 2170 - RNA, 19 nt, Artificial
  Chemically Synthesized
ccauuuuccguaucugcuu

SEQ ID NO: 2171 - RNA, 19 nt, Artificial
  Chemically Synthesized
cuuugcccauucuguuuca

SEQ ID NO: 2172 - RNA, 19 nt, Artificial
  Chemically Synthesized
cguuuggugcuucucagau

SEQ ID NO: 2173 - RNA, 19 nt, Artificial
  Chemically Synthesized
gagauucuccagcacguca

SEQ ID NO: 2174 - RNA, 19 nt, Artificial
  Chemically Synthesized
gucgccaagaaucaugaaa

SEQ ID NO: 2175 - RNA, 19 nt, Artificial
  Chemically Synthesized
gaucaccgacugaaaauau

SEQ ID NO: 2176 - RNA, 19 nt, Artificial
  Chemically Synthesized
ccucucugcacaccuacua

SEQ ID NO: 2177 - RNA, 19 nt, Artificial
  Chemically Synthesized
caagaaucaugaaagucgc

SEQ ID NO: 2178 - RNA, 19 nt, Artificial
  Chemically Synthesized
cgcuuugcccauucuguuu

SEQ ID NO: 2179 - RNA, 19 nt, Artificial
  Chemically Synthesized
uucucagauuucugaggaa

SEQ ID NO: 2180 - RNA, 19 nt, Artificial
  Chemically Synthesized
accuucaguuggagcugaa

SEQ ID NO: 2181 - RNA, 19 nt, Artificial
  Chemically Synthesized
gcuguuacucacgccucaa

SEQ ID NO: 2182 - RNA, 19 nt, Artificial
  Chemically Synthesized
ugaucaccgacugaaaaua

SEQ ID NO: 2183 - RNA, 19 nt, Artificial
  Chemically Synthesized
acaccuacuagucaccaga

SEQ ID NO: 2184 - RNA, 19 nt, Artificial
  Chemically Synthesized
gaaucaugaaagucgccag

SEQ ID NO: 2185 - RNA, 19 nt, Artificial
  Chemically Synthesized
cgggcuuccaccucauuuu

SEQ ID NO: 2186 - RNA, 19 nt, Artificial
  Chemically Synthesized
agaaccgcaaggugagcaa

SEQ ID NO: 2187 - RNA, 19 nt, Artificial
  Chemically Synthesized
ggaauuacgugcucugugg

SEQ ID NO: 2188 - RNA, 19 nt, Artificial
  Chemically Synthesized
guuacucacgccucaagga

SEQ ID NO: 2189 - RNA, 19 nt, Artificial
  Chemically Synthesized
guucuuaacuguuccauuu

SEQ ID NO: 2190 - RNA, 19 nt, Artificial
  Chemically Synthesized
agauucuccagcacgucau

SEQ ID NO: 2191 - RNA, 19 nt, Artificial
  Chemically Synthesized
acgacaugaacggcuguua

SEQ ID NO: 2192 - RNA, 19 nt, Artificial
  Chemically Synthesized
ccgacugaaaauauuguuu

SEQ ID NO: 2193 - RNA, 19 nt, Artificial
  Chemically Synthesized
caccgacugaaaauauugu

SEQ ID NO: 2194 - RNA, 19 nt, Artificial
  Chemically Synthesized
acaaugaucaccgacugaa

SEQ ID NO: 2195 - RNA, 19 nt, Artificial
  Chemically Synthesized
cucagauuucugaggaaau

SEQ ID NO: 2196 - RNA, 19 nt, Artificial
  Chemically Synthesized
aacuguuccauuuuccgua

SEQ ID NO: 2197 - RNA, 19 nt, Artificial
  Chemically Synthesized
ucgcuuugcccauucuguu

SEQ ID NO: 2198 - RNA, 19 nt, Artificial
  Chemically Synthesized
gggcaagaggaauuacgug

SEQ ID NO: 2199 - RNA, 19 nt, Artificial
  Chemically Synthesized
gcaucuugugucgcugaag

SEQ ID NO: 2200 - RNA, 19 nt, Artificial
  Chemically Synthesized
cgacuacaucagggaccuu

SEQ ID NO: 2201 - RNA, 19 nt, Artificial
  Chemically Synthesized
ucaucgacuacaucaggga

SEQ ID NO: 2202 - RNA, 19 nt, Artificial
  Chemically Synthesized
ggugagcaagguggagauu

SEQ ID NO: 2203 - RNA, 19 nt, Artificial
  Chemically Synthesized
cuacgacaugaacggcugu

SEQ ID NO: 2204 - RNA, 19 nt, Artificial
  Chemically Synthesized
cucguguguuucuauuuuu

SEQ ID NO: 2205 - RNA, 19 nt, Artificial
  Chemically Synthesized
uaaacgugcugcucuacga

SEQ ID NO: 2206 - RNA, 19 nt, Artificial
  Chemically Synthesized
ccaccucauuuuuuucgcu

SEQ ID NO: 2207 - RNA, 19 nt, Artificial
  Chemically Synthesized
gaggaauuacgugcucugu

SEQ ID NO: 2208 - RNA, 19 nt, Artificial
  Chemically Synthesized
ucggaauccgaaguuggaa

SEQ ID NO: 2209 - RNA, 19 nt, Artificial
  Chemically Synthesized
cuacaucagggaccuucag

SEQ ID NO: 2210 - RNA, 19 nt, Artificial
  Chemically Synthesized
uguuucagccagucgccaa

SEQ ID NO: 2211 - RNA, 19 nt, Artificial
  Chemically Synthesized
cacguucuuaacuguucca

SEQ ID NO: 2212 - RNA, 19 nt, Artificial
  Chemically Synthesized
gggcuuccaccucauuuuu

SEQ ID NO: 2213 - RNA, 19 nt, Artificial
  Chemically Synthesized
acuguuccauuuuccguau

SEQ ID NO: 2214 - RNA, 19 nt, Artificial
  Chemically Synthesized
uggagauucuccagcacgu

SEQ ID NO: 2215 - RNA, 19 nt, Artificial
  Chemically Synthesized
agccagucgccaagaauca

SEQ ID NO: 2216 - RNA, 19 nt, Artificial
  Chemically Synthesized
cuagucaccagagacuuua

SEQ ID NO: 2217 - RNA, 19 nt, Artificial
  Chemically Synthesized
uacaaugaucaccgacuga

SEQ ID NO: 2218 - RNA, 19 nt, Artificial
  Chemically Synthesized
acucguguguuucuauuuu

SEQ ID NO: 2219 - RNA, 19 nt, Artificial
  Chemically Synthesized
acgugcugcucuacgacau

SEQ ID NO: 2220 - RNA, 19 nt, Artificial
  Chemically Synthesized
ccauucuguuucagccagu

SEQ ID NO: 2221 - RNA, 19 nt, Artificial
  Chemically Synthesized
ccacguucuuaacuguucc

SEQ ID NO: 2222 - RNA, 19 nt, Artificial
  Chemically Synthesized
aucaccgacugaaaauauu

SEQ ID NO: 2223 - RNA, 19 nt, Artificial
  Chemically Synthesized
accuacuagucaccagaga

SEQ ID NO: 2224 - RNA, 19 nt, Artificial
  Chemically Synthesized
cucucugcacaccuacuag

SEQ ID NO: 2225 - RNA, 19 nt, Artificial
  Chemically Synthesized
cggaauccgaaguuggaac

SEQ ID NO: 2226 - RNA, 19 nt, Artificial
  Chemically Synthesized
gauucuccagcacgucauc

SEQ ID NO: 2227 - RNA, 19 nt, Artificial
  Chemically Synthesized
caagguggagauucuccag

SEQ ID NO: 2228 - RNA, 19 nt, Artificial
  Chemically Synthesized
gcugcucuacgacaugaac

SEQ ID NO: 2229 - RNA, 19 nt, Artificial
  Chemically Synthesized
ucagccagucgccaagaau

SEQ ID NO: 2230 - RNA, 19 nt, Artificial
  Chemically Synthesized
gugcuucucagauuucuga

SEQ ID NO: 2231 - RNA, 19 nt, Artificial
  Chemically Synthesized
acuagucaccagagacuuu

SEQ ID NO: 2232 - RNA, 19 nt, Artificial
  Chemically Synthesized
gcccauucuguuucagcca

SEQ ID NO: 2233 - RNA, 19 nt, Artificial
  Chemically Synthesized
accucauuuuuuucgcuuu

SEQ ID NO: 2234 - RNA, 19 nt, Artificial
  Chemically Synthesized
uggugcuucucagauuucu

SEQ ID NO: 2235 - RNA, 19 nt, Artificial
  Chemically Synthesized
ucaugaaagucgccagugg

SEQ ID NO: 2236 - RNA, 19 nt, Artificial
  Chemically Synthesized
augaucaccgacugaaaau

SEQ ID NO: 2237 - RNA, 19 nt, Artificial
  Chemically Synthesized
ucucagauuucugaggaaa

SEQ ID NO: 2238 - RNA, 19 nt, Artificial
  Chemically Synthesized
ucacguuuggugcuucuca

SEQ ID NO: 2239 - RNA, 19 nt, Artificial
  Chemically Synthesized
aaaaaauggucacguuugg

SEQ ID NO: 2240 - RNA, 19 nt, Artificial
  Chemically Synthesized
cguguguuucuauuuuuug

SEQ ID NO: 2241 - RNA, 19 nt, Artificial
  Chemically Synthesized
ucgcaucuugugucgcuga

SEQ ID NO: 2242 - RNA, 19 nt, Artificial
  Chemically Synthesized
caucgacuacaucagggac

SEQ ID NO: 2243 - RNA, 19 nt, Artificial
  Chemically Synthesized
gagcaagguggagauucuc

SEQ ID NO: 2244 - RNA, 19 nt, Artificial
  Chemically Synthesized
ucgccaagaaucaugaaag

SEQ ID NO: 2245 - RNA, 19 nt, Artificial
  Chemically Synthesized
ccucauuuuuuucgcuuug

SEQ ID NO: 2246 - RNA, 19 nt, Artificial
  Chemically Synthesized
uccacucguguguuucuau

SEQ ID NO: 2247 - RNA, 19 nt, Artificial
  Chemically Synthesized
gggauuccacucguguguu

SEQ ID NO: 2248 - RNA, 19 nt, Artificial
  Chemically Synthesized
cacaccuacuagucaccag

SEQ ID NO: 2249 - RNA, 19 nt, Artificial
  Chemically Synthesized
agcacgucaucgacuacau

SEQ ID NO: 2250 - RNA, 19 nt, Artificial
  Chemically Synthesized
ccaagaaucaugaaagucg

SEQ ID NO: 2251 - RNA, 19 nt, Artificial
  Chemically Synthesized
uuuuuuucgcuuugcccau

SEQ ID NO: 2252 - RNA, 19 nt, Artificial
  Chemically Synthesized
guuuuacaauaguucugug

SEQ ID NO: 2253 - RNA, 19 nt, Artificial
  Chemically Synthesized
gauuucugaggaaauugcu

SEQ ID NO: 2254 - RNA, 19 nt, Artificial
  Chemically Synthesized
ggugcuucucagauuucug

SEQ ID NO: 2255 - RNA, 19 nt, Artificial
  Chemically Synthesized
auuccacguucuuaacugu

SEQ ID NO: 2256 - RNA, 19 nt, Artificial
  Chemically Synthesized
aaucaugaaagucgccagu

SEQ ID NO: 2257 - RNA, 19 nt, Artificial
  Chemically Synthesized
ccagucgccaagaaucaug

SEQ ID NO: 2258 - RNA, 19 nt, Artificial
  Chemically Synthesized
auuuuuuucgcuuugccca

SEQ ID NO: 2259 - RNA, 19 nt, Artificial
  Chemically Synthesized
cuucucagauuucugagga

SEQ ID NO: 2260 - RNA, 19 nt, Artificial
  Chemically Synthesized
uccucucugcacaccuacu

SEQ ID NO: 2261 - RNA, 19 nt, Artificial
  Chemically Synthesized
caagaggaauuacgugcuc

SEQ ID NO: 2262 - RNA, 19 nt, Artificial
  Chemically Synthesized
gaccuucaguuggagcuga

SEQ ID NO: 2263 - RNA, 19 nt, Artificial
  Chemically Synthesized
acaucagggaccuucaguu

SEQ ID NO: 2264 - RNA, 19 nt, Artificial
  Chemically Synthesized
cacgucaucgacuacauca

SEQ ID NO: 2265 - RNA, 19 nt, Artificial
  Chemically Synthesized
ucagauuucugaggaaauu

SEQ ID NO: 2266 - RNA, 19 nt, Artificial
  Chemically Synthesized
acugcgcccuuaacugcau

SEQ ID NO: 2267 - RNA, 19 nt, Artificial
  Chemically Synthesized
uucagccagucgccaagaa

SEQ ID NO: 2268 - RNA, 19 nt, Artificial
  Chemically Synthesized
gcaagaggaauuacgugcu

SEQ ID NO: 2269 - RNA, 19 nt, Artificial
  Chemically Synthesized
caccucauuuuuuucgcuu

SEQ ID NO: 2270 - RNA, 19 nt, Artificial
  Chemically Synthesized
accgacugaaaauauuguu

SEQ ID NO: 2271 - RNA, 19 nt, Artificial
  Chemically Synthesized
aucugagggagaacaagac

SEQ ID NO: 2272 - RNA, 19 nt, Artificial
  Chemically Synthesized
ccuucaguuggagcugaac

SEQ ID NO: 2273 - RNA, 19 nt, Artificial
  Chemically Synthesized
ucgacuacaucagggaccu

SEQ ID NO: 2274 - RNA, 19 nt, Artificial
  Chemically Synthesized
gguaaacgugcugcucuac

SEQ ID NO: 2275 - RNA, 19 nt, Artificial
  Chemically Synthesized
aggaauuacgugcucugug

SEQ ID NO: 2276 - RNA, 19 nt, Artificial
  Chemically Synthesized
uucuccagcacgucaucga

SEQ ID NO: 2277 - RNA, 19 nt, Artificial
  Chemically Synthesized
augaaagucgccaguggca

SEQ ID NO: 2278 - RNA, 19 nt, Artificial
  Chemically Synthesized
uucgcuuugcccauucugu

SEQ ID NO: 2279 - RNA, 19 nt, Artificial
  Chemically Synthesized
ggcuuccaccucauuuuuu

SEQ ID NO: 2280 - RNA, 19 nt, Artificial
  Chemically Synthesized
cacucguguguuucuauuu

SEQ ID NO: 2281 - RNA, 19 nt, Artificial
  Chemically Synthesized
cgucaucgacuacaucagg

SEQ ID NO: 2282 - RNA, 19 nt, Artificial
  Chemically Synthesized
cagguaaacgugcugcucu

SEQ ID NO: 2283 - RNA, 19 nt, Artificial
  Chemically Synthesized
ccuacuagucaccagagac

SEQ ID NO: 2284 - RNA, 19 nt, Artificial
  Chemically Synthesized
ucugcacaccuacuaguca

SEQ ID NO: 2285 - RNA, 19 nt, Artificial
  Chemically Synthesized
gaauuacgugcucuguggg

SEQ ID NO: 2286 - RNA, 19 nt, Artificial
  Chemically Synthesized
acgagcagcagguaaacgu

SEQ ID NO: 2287 - RNA, 19 nt, Artificial
  Chemically Synthesized
ucaccgacugaaaauauug

SEQ ID NO: 2288 - RNA, 19 nt, Artificial
  Chemically Synthesized
gaucgcaucuugugucgcu

SEQ ID NO: 2289 - RNA, 19 nt, Artificial
  Chemically Synthesized
uccauuuuccguaucugcu

SEQ ID NO: 2290 - RNA, 19 nt, Artificial
  Chemically Synthesized
guuccauuuuccguaucug

SEQ ID NO: 2291 - RNA, 19 nt, Artificial
  Chemically Synthesized
uguuccauuuuccguaucu

SEQ ID NO: 2292 - RNA, 19 nt, Artificial
  Chemically Synthesized
ucuacgacaugaacggcug

SEQ ID NO: 2293 - RNA, 19 nt, Artificial
  Chemically Synthesized
aaaaauggucacguuuggu

SEQ ID NO: 2294 - RNA, 19 nt, Artificial
  Chemically Synthesized
uuacgugcucugugggucu

SEQ ID NO: 2295 - RNA, 19 nt, Artificial
  Chemically Synthesized
cauuuuuuucgcuuugccc

SEQ ID NO: 2296 - RNA, 19 nt, Artificial
  Chemically Synthesized
uuacaaugaucaccgacug

SEQ ID NO: 2297 - RNA, 19 nt, Artificial
  Chemically Synthesized
cuacuagucaccagagacu

SEQ ID NO: 2298 - RNA, 19 nt, Artificial
  Chemically Synthesized
ugaacucggaauccgaagu

SEQ ID NO: 2299 - RNA, 19 nt, Artificial
  Chemically Synthesized
augaacggcuguuacucac

SEQ ID NO: 2300 - RNA, 19 nt, Artificial
  Chemically Synthesized
agaaucaugaaagucgcca

SEQ ID NO: 2301 - RNA, 19 nt, Artificial
  Chemically Synthesized
cauucuguuucagccaguc

SEQ ID NO: 2302 - RNA, 19 nt, Artificial
  Chemically Synthesized
gcacaccuacuagucacca

SEQ ID NO: 2303 - RNA, 19 nt, Artificial
  Chemically Synthesized
cauuuuccguaucugcuuc

SEQ ID NO: 2304 - RNA, 19 nt, Artificial
  Chemically Synthesized
cugaacucggaauccgaag

SEQ ID NO: 2305 - RNA, 19 nt, Artificial
  Chemically Synthesized
uuccacucguguguuucua

SEQ ID NO: 2306 - RNA, 19 nt, Artificial
  Chemically Synthesized
uagucaccagagacuuuag

SEQ ID NO: 2307 - RNA, 19 nt, Artificial
  Chemically Synthesized
agaggaauuacgugcucug

SEQ ID NO: 2308 - RNA, 19 nt, Artificial
  Chemically Synthesized
acgucaucgacuacaucag

SEQ ID NO: 2309 - RNA, 19 nt, Artificial
  Chemically Synthesized
aacgugcugcucuacgaca

SEQ ID NO: 2310 - RNA, 19 nt, Artificial
  Chemically Synthesized
cuuccaccucauuuuuuuc

SEQ ID NO: 2311 - RNA, 19 nt, Artificial
  Chemically Synthesized
uucgggcuuccaccucauu

SEQ ID NO: 2312 - RNA, 19 nt, Artificial
  Chemically Synthesized
ccuuaacugcauccagccu

SEQ ID NO: 2313 - RNA, 19 nt, Artificial
  Chemically Synthesized
uuggagcugaacucggaau

SEQ ID NO: 2314 - RNA, 19 nt, Artificial
  Chemically Synthesized
aaggugagcaagguggaga

SEQ ID NO: 2315 - RNA, 19 nt, Artificial
  Chemically Synthesized
cuguuacucacgccucaag

SEQ ID NO: 2316 - RNA, 19 nt, Artificial
  Chemically Synthesized
uaacuguuccauuuuccgu

SEQ ID NO: 2317 - RNA, 19 nt, Artificial
  Chemically Synthesized
cucuacgacaugaacggcu

SEQ ID NO: 2318 - RNA, 19 nt, Artificial
  Chemically Synthesized
acguucuuaacuguuccau

SEQ ID NO: 2319 - RNA, 19 nt, Artificial
  Chemically Synthesized
auuucugaggaaauugcuu

SEQ ID NO: 2320 - RNA, 19 nt, Artificial
  Chemically Synthesized
aauggucacguuuggugcu

SEQ ID NO: 2321 - RNA, 19 nt, Artificial
  Chemically Synthesized
caccuacuagucaccagag

SEQ ID NO: 2322 - RNA, 19 nt, Artificial
  Chemically Synthesized
cugcacaccuacuagucac

SEQ ID NO: 2323 - RNA, 19 nt, Artificial
  Chemically Synthesized
aauuacgugcucugugggu

SEQ ID NO: 2324 - RNA, 19 nt, Artificial
  Chemically Synthesized
ucuuaacuguuccauuuuc

SEQ ID NO: 2325 - RNA, 19 nt, Artificial
  Chemically Synthesized
auuacaaugaucaccgacu

SEQ ID NO: 2326 - RNA, 19 nt, Artificial
  Chemically Synthesized
ucgggcuuccaccucauuu

SEQ ID NO: 2327 - RNA, 19 nt, Artificial
  Chemically Synthesized
uaaaaaauggucacguuug

SEQ ID NO: 2328 - RNA, 19 nt, Artificial
  Chemically Synthesized
ugggauuccacucgugugu

SEQ ID NO: 2329 - RNA, 19 nt, Artificial
  Chemically Synthesized
cuucaguuggagcugaacu

SEQ ID NO: 2330 - RNA, 19 nt, Artificial
  Chemically Synthesized
agauuucugaggaaauugc

SEQ ID NO: 2331 - RNA, 19 nt, Artificial
  Chemically Synthesized
uuaacugcauccagccugg

SEQ ID NO: 2332 - RNA, 19 nt, Artificial
  Chemically Synthesized
acaugaacggcuguuacuc

SEQ ID NO: 2333 - RNA, 19 nt, Artificial
  Chemically Synthesized
cuuaacuguuccauuuucc

SEQ ID NO: 2334 - RNA, 19 nt, Artificial
  Chemically Synthesized
uuucagccagucgccaaga

SEQ ID NO: 2335 - RNA, 19 nt, Artificial
  Chemically Synthesized
cccauucuguuucagccag

SEQ ID NO: 2336 - RNA, 19 nt, Artificial
  Chemically Synthesized
auuccacucguguguuucu

SEQ ID NO: 2337 - RNA, 19 nt, Artificial
  Chemically Synthesized
caucuugugucgcugaagc

SEQ ID NO: 2338 - RNA, 19 nt, Artificial
  Chemically Synthesized
gaacucggaauccgaaguu

SEQ ID NO: 2339 - RNA, 19 nt, Artificial
  Chemically Synthesized
aaacgugcugcucuacgac

SEQ ID NO: 2340 - RNA, 19 nt, Artificial
  Chemically Synthesized
ucauuuuuuucgcuuugcc

SEQ ID NO: 2341 - RNA, 19 nt, Artificial
  Chemically Synthesized
uuucugaggaaauugcuuu

SEQ ID NO: 2342 - RNA, 19 nt, Artificial
  Chemically Synthesized
cagcacgucaucgacuaca

SEQ ID NO: 2343 - RNA, 19 nt, Artificial
  Chemically Synthesized
uuuuuucgcuuugcccauu

SEQ ID NO: 2344 - RNA, 19 nt, Artificial
  Chemically Synthesized
uucugaggaaauugcuuug

SEQ ID NO: 2345 - RNA, 19 nt, Artificial
  Chemically Synthesized
ucucugcacaccuacuagu

SEQ ID NO: 2346 - RNA, 19 nt, Artificial
  Chemically Synthesized
acucggaauccgaaguugg

SEQ ID NO: 2347 - RNA, 19 nt, Artificial
  Chemically Synthesized
gucaucgacuacaucaggg

SEQ ID NO: 2348 - RNA, 19 nt, Artificial
  Chemically Synthesized
agcagguaaacgugcugcu

SEQ ID NO: 2349 - RNA, 19 nt, Artificial
  Chemically Synthesized
agcagcagguaaacgugcu

SEQ ID NO: 2350 - RNA, 19 nt, Artificial
  Chemically Synthesized
cucugcacaccuacuaguc

SEQ ID NO: 2351 - RNA, 19 nt, Artificial
  Chemically Synthesized
ucugagggagaacaagacc

SEQ ID NO: 2352 - RNA, 19 nt, Artificial
  Chemically Synthesized
uccacguucuuaacuguuc

SEQ ID NO: 2353 - RNA, 19 nt, Artificial
  Chemically Synthesized
uuuucgcuuugcccauucu

SEQ ID NO: 2354 - RNA, 19 nt, Artificial
  Chemically Synthesized
cagauuucugaggaaauug

SEQ ID NO: 2355 - RNA, 19 nt, Artificial
  Chemically Synthesized
uggucacguuuggugcuuc

SEQ ID NO: 2356 - RNA, 19 nt, Artificial
  Chemically Synthesized
uguuacucacgccucaagg

SEQ ID NO: 2357 - RNA, 19 nt, Artificial
  Chemically Synthesized
guaaacgugcugcucuacg

SEQ ID NO: 2358 - RNA, 19 nt, Artificial
  Chemically Synthesized
uacuagucaccagagacuu

SEQ ID NO: 2359 - RNA, 19 nt, Artificial
  Chemically Synthesized
gacuacaucagggaccuuc

SEQ ID NO: 2360 - RNA, 19 nt, Artificial
  Chemically Synthesized
gccaagaaucaugaaaguc

SEQ ID NO: 2361 - RNA, 19 nt, Artificial
  Chemically Synthesized
uauuacaaugaucaccgac

SEQ ID NO: 2362 - RNA, 19 nt, Artificial
  Chemically Synthesized
gcuucucagauuucugagg

SEQ ID NO: 2363 - RNA, 19 nt, Artificial
  Chemically Synthesized
uggagcugaacucggaauc

SEQ ID NO: 2364 - RNA, 19 nt, Artificial
  Chemically Synthesized
cuguuccauuuuccguauc

SEQ ID NO: 2365 - RNA, 19 nt, Artificial
  Chemically Synthesized
uuaacuguuccauuuuccg

SEQ ID NO: 2366 - RNA, 19 nt, Artificial
  Chemically Synthesized
uuccacguucuuaacuguu

SEQ ID NO: 2367 - RNA, 19 nt, Artificial
  Chemically Synthesized
gcuuugcccauucuguuuc

SEQ ID NO: 2368 - RNA, 19 nt, Artificial
  Chemically Synthesized
guauauuacaaugaucacc

SEQ ID NO: 2369 - RNA, 19 nt, Artificial
  Chemically Synthesized
gauuccacucguguguuuc

SEQ ID NO: 2370 - RNA, 19 nt, Artificial
  Chemically Synthesized
aagaggaauuacgugcucu

SEQ ID NO: 2371 - RNA, 19 nt, Artificial
  Chemically Synthesized
gugagcaagguggagauuc

SEQ ID NO: 2372 - RNA, 19 nt, Artificial
  Chemically Synthesized
ugcucuacgacaugaacgg

SEQ ID NO: 2373 - RNA, 19 nt, Artificial
  Chemically Synthesized
aagaaucaugaaagucgcc

SEQ ID NO: 2374 - RNA, 19 nt, Artificial
  Chemically Synthesized
ugcuucucagauuucugag

SEQ ID NO: 2375 - RNA, 19 nt, Artificial
  Chemically Synthesized
uaucugcuucgggcuucca

SEQ ID NO: 2376 - RNA, 19 nt, Artificial
  Chemically Synthesized
ugcccauucuguuucagcc

SEQ ID NO: 2377 - RNA, 19 nt, Artificial
  Chemically Synthesized
ucugaggaaauugcuuugu

SEQ ID NO: 2378 - RNA, 19 nt, Artificial
  Chemically Synthesized
aaauggucacguuuggugc

SEQ ID NO: 2379 - RNA, 19 nt, Artificial
  Chemically Synthesized
ggcaagaggaauuacgugc

SEQ ID NO: 2380 - RNA, 19 nt, Artificial
  Chemically Synthesized
uuccauuuuccguaucugc

SEQ ID NO: 2381 - RNA, 19 nt, Artificial
  Chemically Synthesized
aucgcaucuugugucgcug

SEQ ID NO: 2382 - RNA, 19 nt, Artificial
  Chemically Synthesized
uacgacaugaacggcuguu

SEQ ID NO: 2383 - RNA, 19 nt, Artificial
  Chemically Synthesized
cucauuuuuuucgcuuugc

SEQ ID NO: 2384 - RNA, 19 nt, Artificial
  Chemically Synthesized
cuuaacugcauccagccug

SEQ ID NO: 2385 - RNA, 19 nt, Artificial
  Chemically Synthesized
ggaauccgaaguuggaacc

SEQ ID NO: 2386 - RNA, 19 nt, Artificial
  Chemically Synthesized
uacaucagggaccuucagu

SEQ ID NO: 2387 - RNA, 19 nt, Artificial
  Chemically Synthesized
uuacucacgccucaaggag

SEQ ID NO: 2388 - RNA, 19 nt, Artificial
  Chemically Synthesized
agucaccagagacuuuagg

SEQ ID NO: 2389 - RNA, 19 nt, Artificial
  Chemically Synthesized
gacgaucgcaucuuguguc

SEQ ID NO: 2390 - RNA, 19 nt, Artificial
  Chemically Synthesized
aacucggaauccgaaguug

SEQ ID NO: 2391 - RNA, 19 nt, Artificial
  Chemically Synthesized
aucagggaccuucaguugg

SEQ ID NO: 2392 - RNA, 19 nt, Artificial
  Chemically Synthesized
cugcucuacgacaugaacg

SEQ ID NO: 2393 - RNA, 19 nt, Artificial
  Chemically Synthesized
uccaccucauuuuuuucgc

SEQ ID NO: 2394 - RNA, 19 nt, Artificial
  Chemically Synthesized
auggucacguuuggugcuu

SEQ ID NO: 2395 - RNA, 19 nt, Artificial
  Chemically Synthesized
ugaacggcuguuacucacg

SEQ ID NO: 2396 - RNA, 19 nt, Artificial
  Chemically Synthesized
uucuguuucagccagucgc

SEQ ID NO: 2397 - RNA, 19 nt, Artificial
  Chemically Synthesized
uuugcccauucuguuucag

SEQ ID NO: 2398 - RNA, 19 nt, Artificial
  Chemically Synthesized
uauauuacaaugaucaccg

SEQ ID NO: 2399 - RNA, 19 nt, Artificial
  Chemically Synthesized
gucacguuuggugcuucuc

SEQ ID NO: 2400 - RNA, 19 nt, Artificial
  Chemically Synthesized
uuucgcuuugcccauucug

SEQ ID NO: 2401 - RNA, 19 nt, Artificial
  Chemically Synthesized
gaauccgaaguuggaaccc

SEQ ID NO: 2402 - RNA, 19 nt, Artificial
  Chemically Synthesized
uuuacaauaguucuguggg

SEQ ID NO: 2403 - RNA, 19 nt, Artificial
  Chemically Synthesized
uucaguuggagcugaacuc

SEQ ID NO: 2404 - RNA, 19 nt, Artificial
  Chemically Synthesized
uuggugcuucucagauuuc

SEQ ID NO: 2405 - RNA, 19 nt, Artificial
  Chemically Synthesized
agcaagguggagauucucc

SEQ ID NO: 2406 - RNA, 19 nt, Artificial
  Chemically Synthesized
auuacgugcucuguggguc

SEQ ID NO: 2407 - RNA, 19 nt, Artificial
  Chemically Synthesized
acgaucgcaucuugugucg

SEQ ID NO: 2408 - RNA, 19 nt, Artificial
  Chemically Synthesized
aagguggagauucuccagc

SEQ ID NO: 2409 - RNA, 19 nt, Artificial
  Chemically Synthesized
aaaauggucacguuuggug

SEQ ID NO: 2410 - RNA, 19 nt, Artificial
  Chemically Synthesized
ugcacaccuacuagucacc

SEQ ID NO: 2411 - RNA, 19 nt, Artificial
  Chemically Synthesized
ucaguuggagcugaacucg

SEQ ID NO: 2412 - RNA, 19 nt, Artificial
  Chemically Synthesized
uuuuacaauaguucugugg

SEQ ID NO: 2413 - RNA, 19 nt, Artificial
  Chemically Synthesized
aucuugugucgcugaagcg

SEQ ID NO: 2414 - RNA, 19 nt, Artificial
  Chemically Synthesized
auucuguuucagccagucg

SEQ ID NO: 2415 - RNA, 19 nt, Artificial
  Chemically Synthesized
aucaugaaagucgccagug

SEQ ID NO: 2416 - RNA, 19 nt, Artificial
  Chemically Synthesized
uuuuucgcuuugcccauuc

SEQ ID NO: 2417 - RNA, 19 nt, Artificial
  Chemically Synthesized
auuuuccguaucugcuucg

SEQ ID NO: 2418 - RNA, 19 nt, Artificial
  Chemically Synthesized
aucgacuacaucagggacc

SEQ ID NO: 2419 - RNA, 19 nt, Artificial
  Chemically Synthesized
uuuccguaucugcuucggg

SEQ ID NO: 2420 - RNA, 19 nt, Artificial
  Chemically Synthesized
uugcccauucuguuucagc

SEQ ID NO: 2421 - RNA, 19 nt, Artificial
  Chemically Synthesized
auucuccagcacgucaucg

SEQ ID NO: 2422 - RNA, 19 nt, Artificial
  Chemically Synthesized
uuuuccguaucugcuucgg

SEQ ID NO: 2423 - RNA, 19 nt, Artificial
  Chemically Synthesized
uuccaccucauuuuuuucg

SEQ ID NO: 2424 - RNA, 19 nt, Artificial
  Chemically Synthesized
uuucagucggugaucauug

SEQ ID NO: 2425 - RNA, 19 nt, Artificial
  Chemically Synthesized
uuguucucccucagauccg

SEQ ID NO: 2426 - RNA, 19 nt, Artificial
  Chemically Synthesized
uagagcagcacguuuaccu

SEQ ID NO: 2427 - RNA, 19 nt, Artificial
  Chemically Synthesized
uuuaccugcugcucgucca

SEQ ID NO: 2428 - RNA, 19 nt, Artificial
  Chemically Synthesized
uucggauuccgaguucagc

SEQ ID NO: 2429 - RNA, 19 nt, Artificial
  Chemically Synthesized
uuccgaguucagcuccaac

SEQ ID NO: 2430 - RNA, 19 nt, Artificial
  Chemically Synthesized
aauggaacaguuaagaacg

SEQ ID NO: 2431 - RNA, 19 nt, Artificial
  Chemically Synthesized
uccgaguucagcuccaacu

SEQ ID NO: 2432 - RNA, 19 nt, Artificial
  Chemically Synthesized
uuuucagucggugaucauu

SEQ ID NO: 2433 - RNA, 19 nt, Artificial
  Chemically Synthesized
aucggucuuguucucccuc

SEQ ID NO: 2434 - RNA, 19 nt, Artificial
  Chemically Synthesized
ucuuguucucccucagauc

SEQ ID NO: 2435 - RNA, 19 nt, Artificial
  Chemically Synthesized
ucaugauucuuggcgacug

SEQ ID NO: 2436 - RNA, 19 nt, Artificial
  Chemically Synthesized
uucaugauucuuggcgacu

SEQ ID NO: 2437 - RNA, 19 nt, Artificial
  Chemically Synthesized
cuuguucucccucagaucc

SEQ ID NO: 2438 - RNA, 19 nt, Artificial
  Chemically Synthesized
ugaaggucccugauguagu

SEQ ID NO: 2439 - RNA, 19 nt, Artificial
  Chemically Synthesized
uucaugucguagagcagca

SEQ ID NO: 2440 - RNA, 19 nt, Artificial
  Chemically Synthesized
ucggucuuguucucccuca

SEQ ID NO: 2441 - RNA, 19 nt, Artificial
  Chemically Synthesized
aaaaaaaugagguggaagc

SEQ ID NO: 2442 - RNA, 19 nt, Artificial
  Chemically Synthesized
uucagcgacacaagaugcg

SEQ ID NO: 2443 - RNA, 19 nt, Artificial
  Chemically Synthesized
ucggauuccgaguucagcu

SEQ ID NO: 2444 - RNA, 19 nt, Artificial
  Chemically Synthesized
aauaacaaaaaaacagccc

SEQ ID NO: 2445 - RNA, 19 nt, Artificial
  Chemically Synthesized
ugcuggagaaucuccaccu

SEQ ID NO: 2446 - RNA, 19 nt, Artificial
  Chemically Synthesized
uggagaaucuccaccuugc

SEQ ID NO: 2447 - RNA, 19 nt, Artificial
  Chemically Synthesized
aucuccaccuugcucaccu

SEQ ID NO: 2448 - RNA, 19 nt, Artificial
  Chemically Synthesized
augauucuuggcgacuggc

SEQ ID NO: 2449 - RNA, 19 nt, Artificial
  Chemically Synthesized
ucugagaagcaccaaacgu

SEQ ID NO: 2450 - RNA, 19 nt, Artificial
  Chemically Synthesized
cugagaagcaccaaacgug

SEQ ID NO: 2451 - RNA, 19 nt, Artificial
  Chemically Synthesized
uccaacuucggauuccgag

SEQ ID NO: 2452 - RNA, 19 nt, Artificial
  Chemically Synthesized
ucggugaucauuguaauau

SEQ ID NO: 2453 - RNA, 19 nt, Artificial
  Chemically Synthesized
aagcagauacggaaaaugg

SEQ ID NO: 2454 - RNA, 19 nt, Artificial
  Chemically Synthesized
ugaaacagaaugggcaaag

SEQ ID NO: 2455 - RNA, 19 nt, Artificial
  Chemically Synthesized
aucugagaagcaccaaacg

SEQ ID NO: 2456 - RNA, 19 nt, Artificial
  Chemically Synthesized
ugacgugcuggagaaucuc

SEQ ID NO: 2457 - RNA, 19 nt, Artificial
  Chemically Synthesized
uuucaugauucuuggcgac

SEQ ID NO: 2458 - RNA, 19 nt, Artificial
  Chemically Synthesized
auauuuucagucggugauc

SEQ ID NO: 2459 - RNA, 19 nt, Artificial
  Chemically Synthesized
uaguaggugugcagagagg

SEQ ID NO: 2460 - RNA, 19 nt, Artificial
  Chemically Synthesized
gcgacuuucaugauucuug

SEQ ID NO: 2461 - RNA, 19 nt, Artificial
  Chemically Synthesized
aaacagaaugggcaaagcg

SEQ ID NO: 2462 - RNA, 19 nt, Artificial
  Chemically Synthesized
uuccucagaaaucugagaa

SEQ ID NO: 2463 - RNA, 19 nt, Artificial
  Chemically Synthesized
uucagcuccaacugaaggu

SEQ ID NO: 2464 - RNA, 19 nt, Artificial
  Chemically Synthesized
uugaggcgugaguaacagc

SEQ ID NO: 2465 - RNA, 19 nt, Artificial
  Chemically Synthesized
uauuuucagucggugauca

SEQ ID NO: 2466 - RNA, 19 nt, Artificial
  Chemically Synthesized
ucuggugacuaguaggugu

SEQ ID NO: 2467 - RNA, 19 nt, Artificial
  Chemically Synthesized
cuggcgacuuucaugauuc

SEQ ID NO: 2468 - RNA, 19 nt, Artificial
  Chemically Synthesized
aaaaugagguggaagcccg

SEQ ID NO: 2469 - RNA, 19 nt, Artificial
  Chemically Synthesized
uugcucaccuugcgguucu

SEQ ID NO: 2470 - RNA, 19 nt, Artificial
  Chemically Synthesized
ccacagagcacguaauucc

SEQ ID NO: 2471 - RNA, 19 nt, Artificial
  Chemically Synthesized
uccuugaggcgugaguaac

SEQ ID NO: 2472 - RNA, 19 nt, Artificial
  Chemically Synthesized
aaauggaacaguuaagaac

SEQ ID NO: 2473 - RNA, 19 nt, Artificial
  Chemically Synthesized
augacgugcuggagaaucu

SEQ ID NO: 2474 - RNA, 19 nt, Artificial
  Chemically Synthesized
uaacagccguucaugucgu

SEQ ID NO: 2475 - RNA, 19 nt, Artificial
  Chemically Synthesized
aaacaauauuuucagucgg

SEQ ID NO: 2476 - RNA, 19 nt, Artificial
  Chemically Synthesized
acaauauuuucagucggug

SEQ ID NO: 2477 - RNA, 19 nt, Artificial
  Chemically Synthesized
uucagucggugaucauugu

SEQ ID NO: 2478 - RNA, 19 nt, Artificial
  Chemically Synthesized
auuuccucagaaaucugag

SEQ ID NO: 2479 - RNA, 19 nt, Artificial
  Chemically Synthesized
uacggaaaauggaacaguu

SEQ ID NO: 2480 - RNA, 19 nt, Artificial
  Chemically Synthesized
aacagaaugggcaaagcga

SEQ ID NO: 2481 - RNA, 19 nt, Artificial
  Chemically Synthesized
cacguaauuccucuugccc

SEQ ID NO: 2482 - RNA, 19 nt, Artificial
  Chemically Synthesized
cuucagcgacacaagaugc

SEQ ID NO: 2483 - RNA, 19 nt, Artificial
  Chemically Synthesized
aaggucccugauguagucg

SEQ ID NO: 2484 - RNA, 19 nt, Artificial
  Chemically Synthesized
ucccugauguagucgauga

SEQ ID NO: 2485 - RNA, 19 nt, Artificial
  Chemically Synthesized
aaucuccaccuugcucacc

SEQ ID NO: 2486 - RNA, 19 nt, Artificial
  Chemically Synthesized
acagccguucaugucguag

SEQ ID NO: 2487 - RNA, 19 nt, Artificial
  Chemically Synthesized
aaaaauagaaacacacgag

SEQ ID NO: 2488 - RNA, 19 nt, Artificial
  Chemically Synthesized
ucguagagcagcacguuua

SEQ ID NO: 2489 - RNA, 19 nt, Artificial
  Chemically Synthesized
agcgaaaaaaaugaggugg

SEQ ID NO: 2490 - RNA, 19 nt, Artificial
  Chemically Synthesized
acagagcacguaauuccuc

SEQ ID NO: 2491 - RNA, 19 nt, Artificial
  Chemically Synthesized
uuccaacuucggauuccga

SEQ ID NO: 2492 - RNA, 19 nt, Artificial
  Chemically Synthesized
cugaaggucccugauguag

SEQ ID NO: 2493 - RNA, 19 nt, Artificial
  Chemically Synthesized
uuggcgacuggcugaaaca

SEQ ID NO: 2494 - RNA, 19 nt, Artificial
  Chemically Synthesized
uggaacaguuaagaacgug

SEQ ID NO: 2495 - RNA, 19 nt, Artificial
  Chemically Synthesized
aaaaaugagguggaagccc

SEQ ID NO: 2496 - RNA, 19 nt, Artificial
  Chemically Synthesized
auacggaaaauggaacagu

SEQ ID NO: 2497 - RNA, 19 nt, Artificial
  Chemically Synthesized
acgugcuggagaaucucca

SEQ ID NO: 2498 - RNA, 19 nt, Artificial
  Chemically Synthesized
ugauucuuggcgacuggcu

SEQ ID NO: 2499 - RNA, 19 nt, Artificial
  Chemically Synthesized
uaaagucucuggugacuag

SEQ ID NO: 2500 - RNA, 19 nt, Artificial
  Chemically Synthesized
ucagucggugaucauugua

SEQ ID NO: 2501 - RNA, 19 nt, Artificial
  Chemically Synthesized
aaaauagaaacacacgagu

SEQ ID NO: 2502 - RNA, 19 nt, Artificial
  Chemically Synthesized
augucguagagcagcacgu

SEQ ID NO: 2503 - RNA, 19 nt, Artificial
  Chemically Synthesized
acuggcugaaacagaaugg

SEQ ID NO: 2504 - RNA, 19 nt, Artificial
  Chemically Synthesized
ggaacaguuaagaacgugg

SEQ ID NO: 2505 - RNA, 19 nt, Artificial
  Chemically Synthesized
aauauuuucagucggugau

SEQ ID NO: 2506 - RNA, 19 nt, Artificial
  Chemically Synthesized
ucucuggugacuaguaggu

SEQ ID NO: 2507 - RNA, 19 nt, Artificial
  Chemically Synthesized
cuaguaggugugcagagag

SEQ ID NO: 2508 - RNA, 19 nt, Artificial
  Chemically Synthesized
guuccaacuucggauuccg

SEQ ID NO: 2509 - RNA, 19 nt, Artificial
  Chemically Synthesized
gaugacgugcuggagaauc

SEQ ID NO: 2510 - RNA, 19 nt, Artificial
  Chemically Synthesized
cuggagaaucuccaccuug

SEQ ID NO: 2511 - RNA, 19 nt, Artificial
  Chemically Synthesized
guucaugucguagagcagc

SEQ ID NO: 2512 - RNA, 19 nt, Artificial
  Chemically Synthesized
auucuuggcgacuggcuga

SEQ ID NO: 2513 - RNA, 19 nt, Artificial
  Chemically Synthesized
ucagaaaucugagaagcac

SEQ ID NO: 2514 - RNA, 19 nt, Artificial
  Chemically Synthesized
aaagucucuggugacuagu

SEQ ID NO: 2515 - RNA, 19 nt, Artificial
  Chemically Synthesized
uggcugaaacagaaugggc

SEQ ID NO: 2516 - RNA, 19 nt, Artificial
  Chemically Synthesized
aaagcgaaaaaaaugaggu

SEQ ID NO: 2517 - RNA, 19 nt, Artificial
  Chemically Synthesized
agaaaucugagaagcacca

SEQ ID NO: 2518 - RNA, 19 nt, Artificial
  Chemically Synthesized
ccacuggcgacuuucauga

SEQ ID NO: 2519 - RNA, 19 nt, Artificial
  Chemically Synthesized
auuuucagucggugaucau

SEQ ID NO: 2520 - RNA, 19 nt, Artificial
  Chemically Synthesized
uuuccucagaaaucugaga

SEQ ID NO: 2521 - RNA, 19 nt, Artificial
  Chemically Synthesized
ugagaagcaccaaacguga

SEQ ID NO: 2522 - RNA, 19 nt, Artificial
  Chemically Synthesized
ccaaacgugaccauuuuuu

SEQ ID NO: 2523 - RNA, 19 nt, Artificial
  Chemically Synthesized
caaaaaauagaaacacacg

SEQ ID NO: 2524 - RNA, 19 nt, Artificial
  Chemically Synthesized
ucagcgacacaagaugcga

SEQ ID NO: 2525 - RNA, 19 nt, Artificial
  Chemically Synthesized
gucccugauguagucgaug

SEQ ID NO: 2526 - RNA, 19 nt, Artificial
  Chemically Synthesized
gagaaucuccaccuugcuc

SEQ ID NO: 2527 - RNA, 19 nt, Artificial
  Chemically Synthesized
cuuucaugauucuuggcga

SEQ ID NO: 2528 - RNA, 19 nt, Artificial
  Chemically Synthesized
caaagcgaaaaaaaugagg

SEQ ID NO: 2529 - RNA, 19 nt, Artificial
  Chemically Synthesized
auagaaacacacgagugga

SEQ ID NO: 2530 - RNA, 19 nt, Artificial
  Chemically Synthesized
aacacacgaguggaauccc

SEQ ID NO: 2531 - RNA, 19 nt, Artificial
  Chemically Synthesized
cuggugacuaguaggugug

SEQ ID NO: 2532 - RNA, 19 nt, Artificial
  Chemically Synthesized
auguagucgaugacgugcu

SEQ ID NO: 2533 - RNA, 19 nt, Artificial
  Chemically Synthesized
cgacuuucaugauucuugg

SEQ ID NO: 2534 - RNA, 19 nt, Artificial
  Chemically Synthesized
augggcaaagcgaaaaaaa

SEQ ID NO: 2535 - RNA, 19 nt, Artificial
  Chemically Synthesized
cacagaacuauuguaaaac

SEQ ID NO: 2536 - RNA, 19 nt, Artificial
  Chemically Synthesized
agcaauuuccucagaaauc

SEQ ID NO: 2537 - RNA, 19 nt, Artificial
  Chemically Synthesized
cagaaaucugagaagcacc

SEQ ID NO: 2538 - RNA, 19 nt, Artificial
  Chemically Synthesized
acaguuaagaacguggaau

SEQ ID NO: 2539 - RNA, 19 nt, Artificial
  Chemically Synthesized
acuggcgacuuucaugauu

SEQ ID NO: 2540 - RNA, 19 nt, Artificial
  Chemically Synthesized
caugauucuuggcgacugg

SEQ ID NO: 2541 - RNA, 19 nt, Artificial
  Chemically Synthesized
ugggcaaagcgaaaaaaau

SEQ ID NO: 2542 - RNA, 19 nt, Artificial
  Chemically Synthesized
uccucagaaaucugagaag

SEQ ID NO: 2543 - RNA, 19 nt, Artificial
  Chemically Synthesized
aguaggugugcagagagga

SEQ ID NO: 2544 - RNA, 19 nt, Artificial
  Chemically Synthesized
gagcacguaauuccucuug

SEQ ID NO: 2545 - RNA, 19 nt, Artificial
  Chemically Synthesized
ucagcuccaacugaagguc

SEQ ID NO: 2546 - RNA, 19 nt, Artificial
  Chemically Synthesized
aacugaaggucccugaugu

SEQ ID NO: 2547 - RNA, 19 nt, Artificial
  Chemically Synthesized
ugauguagucgaugacgug

SEQ ID NO: 2548 - RNA, 19 nt, Artificial
  Chemically Synthesized
aauuuccucagaaaucuga

SEQ ID NO: 2549 - RNA, 19 nt, Artificial
  Chemically Synthesized
augcaguuaagggcgcagu

SEQ ID NO: 2550 - RNA, 19 nt, Artificial
  Chemically Synthesized
uucuuggcgacuggcugaa

SEQ ID NO: 2551 - RNA, 19 nt, Artificial
  Chemically Synthesized
agcacguaauuccucuugc

SEQ ID NO: 2552 - RNA, 19 nt, Artificial
  Chemically Synthesized
aagcgaaaaaaaugaggug

SEQ ID NO: 2553 - RNA, 19 nt, Artificial
  Chemically Synthesized
aacaauauuuucagucggu

SEQ ID NO: 2554 - RNA, 19 nt, Artificial
  Chemically Synthesized
gucuuguucucccucagau

SEQ ID NO: 2555 - RNA, 19 nt, Artificial
  Chemically Synthesized
guucagcuccaacugaagg

SEQ ID NO: 2556 - RNA, 19 nt, Artificial
  Chemically Synthesized
aggucccugauguagucga

SEQ ID NO: 2557 - RNA, 19 nt, Artificial
  Chemically Synthesized
guagagcagcacguuuacc

SEQ ID NO: 2558 - RNA, 19 nt, Artificial
  Chemically Synthesized
cacagagcacguaauuccu

SEQ ID NO: 2559 - RNA, 19 nt, Artificial
  Chemically Synthesized
ucgaugacgugcuggagaa

SEQ ID NO: 2560 - RNA, 19 nt, Artificial
  Chemically Synthesized
ugccacuggcgacuuucau

SEQ ID NO: 2561 - RNA, 19 nt, Artificial
  Chemically Synthesized
acagaaugggcaaagcgaa

SEQ ID NO: 2562 - RNA, 19 nt, Artificial
  Chemically Synthesized
aaaaaaugagguggaagcc

SEQ ID NO: 2563 - RNA, 19 nt, Artificial
  Chemically Synthesized
aaauagaaacacacgagug

SEQ ID NO: 2564 - RNA, 19 nt, Artificial
  Chemically Synthesized
ccugauguagucgaugacg

SEQ ID NO: 2565 - RNA, 19 nt, Artificial
  Chemically Synthesized
agagcagcacguuuaccug

SEQ ID NO: 2566 - RNA, 19 nt, Artificial
  Chemically Synthesized
gucucuggugacuaguagg

SEQ ID NO: 2567 - RNA, 19 nt, Artificial
  Chemically Synthesized
ugacuaguaggugugcaga

SEQ ID NO: 2568 - RNA, 19 nt, Artificial
  Chemically Synthesized
cccacagagcacguaauuc

SEQ ID NO: 2569 - RNA, 19 nt, Artificial
  Chemically Synthesized
acguuuaccugcugcucgu

SEQ ID NO: 2570 - RNA, 19 nt, Artificial
  Chemically Synthesized
caauauuuucagucgguga

SEQ ID NO: 2571 - RNA, 19 nt, Artificial
  Chemically Synthesized
agcgacacaagaugcgauc

SEQ ID NO: 2572 - RNA, 19 nt, Artificial
  Chemically Synthesized
agcagauacggaaaaugga

SEQ ID NO: 2573 - RNA, 19 nt, Artificial
  Chemically Synthesized
cagauacggaaaauggaac

SEQ ID NO: 2574 - RNA, 19 nt, Artificial
  Chemically Synthesized
agauacggaaaauggaaca

SEQ ID NO: 2575 - RNA, 19 nt, Artificial
  Chemically Synthesized
cagccguucaugucguaga

SEQ ID NO: 2576 - RNA, 19 nt, Artificial
  Chemically Synthesized
accaaacgugaccauuuuu

SEQ ID NO: 2577 - RNA, 19 nt, Artificial
  Chemically Synthesized
agacccacagagcacguaa

SEQ ID NO: 2578 - RNA, 19 nt, Artificial
  Chemically Synthesized
gggcaaagcgaaaaaaaug

SEQ ID NO: 2579 - RNA, 19 nt, Artificial
  Chemically Synthesized
cagucggugaucauuguaa

SEQ ID NO: 2580 - RNA, 19 nt, Artificial
  Chemically Synthesized
agucucuggugacuaguag

SEQ ID NO: 2581 - RNA, 19 nt, Artificial
  Chemically Synthesized
acuucggauuccgaguuca

SEQ ID NO: 2582 - RNA, 19 nt, Artificial
  Chemically Synthesized
gugaguaacagccguucau

SEQ ID NO: 2583 - RNA, 19 nt, Artificial
  Chemically Synthesized
uggcgacuuucaugauucu

SEQ ID NO: 2584 - RNA, 19 nt, Artificial
  Chemically Synthesized
gacuggcugaaacagaaug

SEQ ID NO: 2585 - RNA, 19 nt, Artificial
  Chemically Synthesized
uggugacuaguaggugugc

SEQ ID NO: 2586 - RNA, 19 nt, Artificial
  Chemically Synthesized
gaagcagauacggaaaaug

SEQ ID NO: 2587 - RNA, 19 nt, Artificial
  Chemically Synthesized
cuucggauuccgaguucag

SEQ ID NO: 2588 - RNA, 19 nt, Artificial
  Chemically Synthesized
uagaaacacacgaguggaa

SEQ ID NO: 2589 - RNA, 19 nt, Artificial
  Chemically Synthesized
cuaaagucucuggugacua

SEQ ID NO: 2590 - RNA, 19 nt, Artificial
  Chemically Synthesized
cagagcacguaauuccucu

SEQ ID NO: 2591 - RNA, 19 nt, Artificial
  Chemically Synthesized
cugauguagucgaugacgu

SEQ ID NO: 2592 - RNA, 19 nt, Artificial
  Chemically Synthesized
ugucguagagcagcacguu

SEQ ID NO: 2593 - RNA, 19 nt, Artificial
  Chemically Synthesized
gaaaaaaaugagguggaag

SEQ ID NO: 2594 - RNA, 19 nt, Artificial
  Chemically Synthesized
aaugagguggaagcccgaa

SEQ ID NO: 2595 - RNA, 19 nt, Artificial
  Chemically Synthesized
aggcuggaugcaguuaagg

SEQ ID NO: 2596 - RNA, 19 nt, Artificial
  Chemically Synthesized
auuccgaguucagcuccaa

SEQ ID NO: 2597 - RNA, 19 nt, Artificial
  Chemically Synthesized
ucuccaccuugcucaccuu

SEQ ID NO: 2598 - RNA, 19 nt, Artificial
  Chemically Synthesized
cuugaggcgugaguaacag

SEQ ID NO: 2599 - RNA, 19 nt, Artificial
  Chemically Synthesized
acggaaaauggaacaguua

SEQ ID NO: 2600 - RNA, 19 nt, Artificial
  Chemically Synthesized
agccguucaugucguagag

SEQ ID NO: 2601 - RNA, 19 nt, Artificial
  Chemically Synthesized
auggaacaguuaagaacgu

SEQ ID NO: 2602 - RNA, 19 nt, Artificial
  Chemically Synthesized
aagcaauuuccucagaaau

SEQ ID NO: 2603 - RNA, 19 nt, Artificial
  Chemically Synthesized
agcaccaaacgugaccauu

SEQ ID NO: 2604 - RNA, 19 nt, Artificial
  Chemically Synthesized
cucuggugacuaguaggug

SEQ ID NO: 2605 - RNA, 19 nt, Artificial
  Chemically Synthesized
gugacuaguaggugugcag

SEQ ID NO: 2606 - RNA, 19 nt, Artificial
  Chemically Synthesized
acccacagagcacguaauu

SEQ ID NO: 2607 - RNA, 19 nt, Artificial
  Chemically Synthesized
gaaaauggaacaguuaaga

SEQ ID NO: 2608 - RNA, 19 nt, Artificial
  Chemically Synthesized
agucggugaucauuguaau

SEQ ID NO: 2609 - RNA, 19 nt, Artificial
  Chemically Synthesized
aaaugagguggaagcccga

SEQ ID NO: 2610 - RNA, 19 nt, Artificial
  Chemically Synthesized
caaacgugaccauuuuuua

SEQ ID NO: 2611 - RNA, 19 nt, Artificial
  Chemically Synthesized
acacacgaguggaauccca

SEQ ID NO: 2612 - RNA, 19 nt, Artificial
  Chemically Synthesized
aguucagcuccaacugaag

SEQ ID NO: 2613 - RNA, 19 nt, Artificial
  Chemically Synthesized
gcaauuuccucagaaaucu

SEQ ID NO: 2614 - RNA, 19 nt, Artificial
  Chemically Synthesized
ccaggcuggaugcaguuaa

SEQ ID NO: 2615 - RNA, 19 nt, Artificial
  Chemically Synthesized
gaguaacagccguucaugu

SEQ ID NO: 2616 - RNA, 19 nt, Artificial
  Chemically Synthesized
ggaaaauggaacaguuaag

SEQ ID NO: 2617 - RNA, 19 nt, Artificial
  Chemically Synthesized
ucuuggcgacuggcugaaa

SEQ ID NO: 2618 - RNA, 19 nt, Artificial
  Chemically Synthesized
cuggcugaaacagaauggg

SEQ ID NO: 2619 - RNA, 19 nt, Artificial
  Chemically Synthesized
agaaacacacgaguggaau

SEQ ID NO: 2620 - RNA, 19 nt, Artificial
  Chemically Synthesized
gcuucagcgacacaagaug

SEQ ID NO: 2621 - RNA, 19 nt, Artificial
  Chemically Synthesized
aacuucggauuccgaguuc

SEQ ID NO: 2622 - RNA, 19 nt, Artificial
  Chemically Synthesized
gucguagagcagcacguuu

SEQ ID NO: 2623 - RNA, 19 nt, Artificial
  Chemically Synthesized
ggcaaagcgaaaaaaauga

SEQ ID NO: 2624 - RNA, 19 nt, Artificial
  Chemically Synthesized
aaagcaauuuccucagaaa

SEQ ID NO: 2625 - RNA, 19 nt, Artificial
  Chemically Synthesized
uguagucgaugacgugcug

SEQ ID NO: 2626 - RNA, 19 nt, Artificial
  Chemically Synthesized
aaugggcaaagcgaaaaaa

SEQ ID NO: 2627 - RNA, 19 nt, Artificial
  Chemically Synthesized
caaagcaauuuccucagaa

SEQ ID NO: 2628 - RNA, 19 nt, Artificial
  Chemically Synthesized
acuaguaggugugcagaga

SEQ ID NO: 2629 - RNA, 19 nt, Artificial
  Chemically Synthesized
ccaacuucggauuccgagu

SEQ ID NO: 2630 - RNA, 19 nt, Artificial
  Chemically Synthesized
cccugauguagucgaugac

SEQ ID NO: 2631 - RNA, 19 nt, Artificial
  Chemically Synthesized
agcagcacguuuaccugcu

SEQ ID NO: 2632 - RNA, 19 nt, Artificial
  Chemically Synthesized
agcacguuuaccugcugcu

SEQ ID NO: 2633 - RNA, 19 nt, Artificial
  Chemically Synthesized
gacuaguaggugugcagag

SEQ ID NO: 2634 - RNA, 19 nt, Artificial
  Chemically Synthesized
ggucuuguucucccucaga

SEQ ID NO: 2635 - RNA, 19 nt, Artificial
  Chemically Synthesized
gaacaguuaagaacgugga

SEQ ID NO: 2636 - RNA, 19 nt, Artificial
  Chemically Synthesized
agaaugggcaaagcgaaaa

SEQ ID NO: 2637 - RNA, 19 nt, Artificial
  Chemically Synthesized
caauuuccucagaaaucug

SEQ ID NO: 2638 - RNA, 19 nt, Artificial
  Chemically Synthesized
gaagcaccaaacgugacca

SEQ ID NO: 2639 - RNA, 19 nt, Artificial
  Chemically Synthesized
ccuugaggcgugaguaaca

SEQ ID NO: 2640 - RNA, 19 nt, Artificial
  Chemically Synthesized
cguagagcagcacguuuac

SEQ ID NO: 2641 - RNA, 19 nt, Artificial
  Chemically Synthesized
aagucucuggugacuagua

SEQ ID NO: 2642 - RNA, 19 nt, Artificial
  Chemically Synthesized
gaaggucccugauguaguc

SEQ ID NO: 2643 - RNA, 19 nt, Artificial
  Chemically Synthesized
gacuuucaugauucuuggc

SEQ ID NO: 2644 - RNA, 19 nt, Artificial
  Chemically Synthesized
gucggugaucauuguaaua

SEQ ID NO: 2645 - RNA, 19 nt, Artificial
  Chemically Synthesized
ccucagaaaucugagaagc

SEQ ID NO: 2646 - RNA, 19 nt, Artificial
  Chemically Synthesized
gauuccgaguucagcucca

SEQ ID NO: 2647 - RNA, 19 nt, Artificial
  Chemically Synthesized
gauacggaaaauggaacag

SEQ ID NO: 2648 - RNA, 19 nt, Artificial
  Chemically Synthesized
cggaaaauggaacaguuaa

SEQ ID NO: 2649 - RNA, 19 nt, Artificial
  Chemically Synthesized
aacaguuaagaacguggaa

SEQ ID NO: 2650 - RNA, 19 nt, Artificial
  Chemically Synthesized
gaaacagaaugggcaaagc

SEQ ID NO: 2651 - RNA, 19 nt, Artificial
  Chemically Synthesized
ggugaucauuguaauauac

SEQ ID NO: 2652 - RNA, 19 nt, Artificial
  Chemically Synthesized
gaaacacacgaguggaauc

SEQ ID NO: 2653 - RNA, 19 nt, Artificial
  Chemically Synthesized
agagcacguaauuccucuu

SEQ ID NO: 2654 - RNA, 19 nt, Artificial
  Chemically Synthesized
gaaucuccaccuugcucac

SEQ ID NO: 2655 - RNA, 19 nt, Artificial
  Chemically Synthesized
ccguucaugucguagagca

SEQ ID NO: 2656 - RNA, 19 nt, Artificial
  Chemically Synthesized
ggcgacuuucaugauucuu

SEQ ID NO: 2657 - RNA, 19 nt, Artificial
  Chemically Synthesized
cucagaaaucugagaagca

SEQ ID NO: 2658 - RNA, 19 nt, Artificial
  Chemically Synthesized
uggaagcccgaagcagaua

SEQ ID NO: 2659 - RNA, 19 nt, Artificial
  Chemically Synthesized
ggcugaaacagaaugggca

SEQ ID NO: 2660 - RNA, 19 nt, Artificial
  Chemically Synthesized
acaaagcaauuuccucaga

SEQ ID NO: 2661 - RNA, 19 nt, Artificial
  Chemically Synthesized
gcaccaaacgugaccauuu

SEQ ID NO: 2662 - RNA, 19 nt, Artificial
  Chemically Synthesized
gcacguaauuccucuugcc

SEQ ID NO: 2663 - RNA, 19 nt, Artificial
  Chemically Synthesized
gcagauacggaaaauggaa

SEQ ID NO: 2664 - RNA, 19 nt, Artificial
  Chemically Synthesized
cagcgacacaagaugcgau

SEQ ID NO: 2665 - RNA, 19 nt, Artificial
  Chemically Synthesized
aacagccguucaugucgua

SEQ ID NO: 2666 - RNA, 19 nt, Artificial
  Chemically Synthesized
gcaaagcgaaaaaaaugag

SEQ ID NO: 2667 - RNA, 19 nt, Artificial
  Chemically Synthesized
caggcuggaugcaguuaag

SEQ ID NO: 2668 - RNA, 19 nt, Artificial
  Chemically Synthesized
gguuccaacuucggauucc

SEQ ID NO: 2669 - RNA, 19 nt, Artificial
  Chemically Synthesized
acugaaggucccugaugua

SEQ ID NO: 2670 - RNA, 19 nt, Artificial
  Chemically Synthesized
cuccuugaggcgugaguaa

SEQ ID NO: 2671 - RNA, 19 nt, Artificial
  Chemically Synthesized
ccuaaagucucuggugacu

SEQ ID NO: 2672 - RNA, 19 nt, Artificial
  Chemically Synthesized
gacacaagaugcgaucguc

SEQ ID NO: 2673 - RNA, 19 nt, Artificial
  Chemically Synthesized
caacuucggauuccgaguu

SEQ ID NO: 2674 - RNA, 19 nt, Artificial
  Chemically Synthesized
ccaacugaaggucccugau

SEQ ID NO: 2675 - RNA, 19 nt, Artificial
  Chemically Synthesized
cguucaugucguagagcag

SEQ ID NO: 2676 - RNA, 19 nt, Artificial
  Chemically Synthesized
gcgaaaaaaaugaggugga

SEQ ID NO: 2677 - RNA, 19 nt, Artificial
  Chemically Synthesized
aagcaccaaacgugaccau

SEQ ID NO: 2678 - RNA, 19 nt, Artificial
  Chemically Synthesized
cgugaguaacagccguuca

SEQ ID NO: 2679 - RNA, 19 nt, Artificial
  Chemically Synthesized
gcgacuggcugaaacagaa

SEQ ID NO: 2680 - RNA, 19 nt, Artificial
  Chemically Synthesized
cugaaacagaaugggcaaa

SEQ ID NO: 2681 - RNA, 19 nt, Artificial
  Chemically Synthesized
cggugaucauuguaauaua

SEQ ID NO: 2682 - RNA, 19 nt, Artificial
  Chemically Synthesized
gagaagcaccaaacgugac

SEQ ID NO: 2683 - RNA, 19 nt, Artificial
  Chemically Synthesized
cagaaugggcaaagcgaaa

SEQ ID NO: 2684 - RNA, 19 nt, Artificial
  Chemically Synthesized
ggguuccaacuucggauuc

SEQ ID NO: 2685 - RNA, 19 nt, Artificial
  Chemically Synthesized
cccacagaacuauuguaaa

SEQ ID NO: 2686 - RNA, 19 nt, Artificial
  Chemically Synthesized
gaguucagcuccaacugaa

SEQ ID NO: 2687 - RNA, 19 nt, Artificial
  Chemically Synthesized
gaaaucugagaagcaccaa

SEQ ID NO: 2688 - RNA, 19 nt, Artificial
  Chemically Synthesized
ggagaaucuccaccuugcu

SEQ ID NO: 2689 - RNA, 19 nt, Artificial
  Chemically Synthesized
gacccacagagcacguaau

SEQ ID NO: 2690 - RNA, 19 nt, Artificial
  Chemically Synthesized
cgacacaagaugcgaucgu

SEQ ID NO: 2691 - RNA, 19 nt, Artificial
  Chemically Synthesized
gcuggagaaucuccaccuu

SEQ ID NO: 2692 - RNA, 19 nt, Artificial
  Chemically Synthesized
caccaaacgugaccauuuu

SEQ ID NO: 2693 - RNA, 19 nt, Artificial
  Chemically Synthesized
ggugacuaguaggugugca

SEQ ID NO: 2694 - RNA, 19 nt, Artificial
  Chemically Synthesized
cgaguucagcuccaacuga

SEQ ID NO: 2695 - RNA, 19 nt, Artificial
  Chemically Synthesized
ccacagaacuauuguaaaa

SEQ ID NO: 2696 - RNA, 19 nt, Artificial
  Chemically Synthesized
cgcuucagcgacacaagau

SEQ ID NO: 2697 - RNA, 19 nt, Artificial
  Chemically Synthesized
cgacuggcugaaacagaau

SEQ ID NO: 2698 - RNA, 19 nt, Artificial
  Chemically Synthesized
cacuggcgacuuucaugau

SEQ ID NO: 2699 - RNA, 19 nt, Artificial
  Chemically Synthesized
gaaugggcaaagcgaaaaa

SEQ ID NO: 2700 - RNA, 19 nt, Artificial
  Chemically Synthesized
cgaagcagauacggaaaau

SEQ ID NO: 2701 - RNA, 19 nt, Artificial
  Chemically Synthesized
ggucccugauguagucgau

SEQ ID NO: 2702 - RNA, 19 nt, Artificial
  Chemically Synthesized
cccgaagcagauacggaaa

SEQ ID NO: 2703 - RNA, 19 nt, Artificial
  Chemically Synthesized
gcugaaacagaaugggcaa

SEQ ID NO: 2704 - RNA, 19 nt, Artificial
  Chemically Synthesized
cgaugacgugcuggagaau

SEQ ID NO: 2705 - RNA, 19 nt, Artificial
  Chemically Synthesized
ccgaagcagauacggaaaa

SEQ ID NO: 2706 - RNA, 19 nt, Artificial
  Chemically Synthesized
cgaaaaaaaugagguggaa

SEQ ID NO: 2707 - RNA, 19 nt, artificial
  Chemically Synthesized
ugcuauacaacaugaacga

SEQ ID NO: 2708 - RNA, 19 nt, artificial
  Chemically Synthesized
augaacgacugcuacucca

SEQ ID NO: 2709 - RNA, 19 nt, artificial
  Chemically Synthesized
acaacaugaacgacugcua

SEQ ID NO: 2710 - RNA, 19 nt, artificial
  Chemically Synthesized
uguuauaacugaacccaaa

SEQ ID NO: 2711 - RNA, 19 nt, artificial
  Chemically Synthesized
gccugcuauacaacaugaa

SEQ ID NO: 2712 - RNA, 19 nt, artificial
  Chemically Synthesized
ccuucugaguuaaugucaa

SEQ ID NO: 2713 - RNA, 19 nt, artificial
  Chemically Synthesized
gucuauuucugcauucaaa

SEQ ID NO: 2714 - RNA, 19 nt, artificial
  Chemically Synthesized
cgaaaacguuaaaaucaca

SEQ ID NO: 2715 - RNA, 19 nt, artificial
  Chemically Synthesized
ugaacgacugcuacuccaa

SEQ ID NO: 2716 - RNA, 19 nt, artificial
  Chemically Synthesized
caacaugaacgacugcuac

SEQ ID NO: 2717 - RNA, 19 nt, artificial
  Chemically Synthesized
cuauacaacaugaacgacu

SEQ ID NO: 2718 - RNA, 19 nt, artificial
  Chemically Synthesized
uauacaacaugaacgacug

SEQ ID NO: 2719 - RNA, 19 nt, artificial
  Chemically Synthesized
cguuaaaaucacaaggaau

SEQ ID NO: 2720 - RNA, 19 nt, artificial
  Chemically Synthesized
gaaggaaaacuaagaauga

SEQ ID NO: 2721 - RNA, 19 nt, artificial
  Chemically Synthesized
gaaucuuuuaagugcugaa

SEQ ID NO: 2722 - RNA, 19 nt, artificial
  Chemically Synthesized
gacuuugccuuuuuucaaa

SEQ ID NO: 2723 - RNA, 19 nt, artificial
  Chemically Synthesized
cggucagcaugaaagccuu

SEQ ID NO: 2724 - RNA, 19 nt, artificial
  Chemically Synthesized
acguuaaaaucacaaggaa

SEQ ID NO: 2725 - RNA, 19 nt, artificial
  Chemically Synthesized
ggguguucucuuacuugga

SEQ ID NO: 2726 - RNA, 19 nt, artificial
  Chemically Synthesized
ccuacugaaugcuguguau

SEQ ID NO: 2727 - RNA, 19 nt, artificial
  Chemically Synthesized
gaagucuuuuggucagaaa

SEQ ID NO: 2728 - RNA, 19 nt, artificial
  Chemically Synthesized
ccaguauucagucacuuaa

SEQ ID NO: 2729 - RNA, 19 nt, artificial
  Chemically Synthesized
caguauucagucacuuaaa

SEQ ID NO: 2730 - RNA, 19 nt, artificial
  Chemically Synthesized
caaggaauugcccaaucua

SEQ ID NO: 2731 - RNA, 19 nt, artificial
  Chemically Synthesized
gaacgacugcuacuccaag

SEQ ID NO: 2732 - RNA, 19 nt, artificial
  Chemically Synthesized
ggagcgaaaacguuaaaau

SEQ ID NO: 2733 - RNA, 19 nt, artificial
  Chemically Synthesized
gaacccaaauaaauacaag

SEQ ID NO: 2734 - RNA, 19 nt, artificial
  Chemically Synthesized
gcuauacaacaugaacgac

SEQ ID NO: 2735 - RNA, 19 nt, artificial
  Chemically Synthesized
aaggaauugcccaaucuaa

SEQ ID NO: 2736 - RNA, 19 nt, artificial
  Chemically Synthesized
agaaggugagcaagaugga

SEQ ID NO: 2737 - RNA, 19 nt, artificial
  Chemically Synthesized
acugcuacuccaagcucaa

SEQ ID NO: 2738 - RNA, 19 nt, artificial
  Chemically Synthesized
gggagcgaaaacguuaaaa

SEQ ID NO: 2739 - RNA, 19 nt, artificial
  Chemically Synthesized
ggacugugauauucguuau

SEQ ID NO: 2740 - RNA, 19 nt, artificial
  Chemically Synthesized
ccagugcuuugauuuuuau

SEQ ID NO: 2741 - RNA, 19 nt, artificial
  Chemically Synthesized
caugaacgacugcuacucc

SEQ ID NO: 2742 - RNA, 19 nt, artificial
  Chemically Synthesized
ccuuuuugacacaagccua

SEQ ID NO: 2743 - RNA, 19 nt, artificial
  Chemically Synthesized
guccuugcaggcuucugaa

SEQ ID NO: 2744 - RNA, 19 nt, artificial
  Chemically Synthesized
ugagguccguuaggaaaaa

SEQ ID NO: 2745 - RNA, 19 nt, artificial
  Chemically Synthesized
ggaaaacuaagaaugauca

SEQ ID NO: 2746 - RNA, 19 nt, artificial
  Chemically Synthesized
gugagguccguuaggaaaa

SEQ ID NO: 2747 - RNA, 19 nt, artificial
  Chemically Synthesized
guuggaagguuuucuuuau

SEQ ID NO: 2748 - RNA, 19 nt, artificial
  Chemically Synthesized
cauuucacaaggaggacaa

SEQ ID NO: 2749 - RNA, 19 nt, artificial
  Chemically Synthesized
ggaaaaacagccugucgga

SEQ ID NO: 2750 - RNA, 19 nt, artificial
  Chemically Synthesized
aggugagcaagauggaaau

SEQ ID NO: 2751 - RNA, 19 nt, artificial
  Chemically Synthesized
ggugauugccugcuuuauu

SEQ ID NO: 2752 - RNA, 19 nt, artificial
  Chemically Synthesized
ugauguacuuauucaugcu

SEQ ID NO: 2753 - RNA, 19 nt, artificial
  Chemically Synthesized
cuuguauaguggcagagau

SEQ ID NO: 2754 - RNA, 19 nt, artificial
  Chemically Synthesized
ccuugugaacucuuuaauu

SEQ ID NO: 2755 - RNA, 19 nt, artificial
  Chemically Synthesized
agccugcuauacaacauga

SEQ ID NO: 2756 - RNA, 19 nt, artificial
  Chemically Synthesized
gcccuuucugcaguuggaa

SEQ ID NO: 2757 - RNA, 19 nt, artificial
  Chemically Synthesized
caacaacaaauucacggaa

SEQ ID NO: 2758 - RNA, 19 nt, artificial
  Chemically Synthesized
cugaauaagcgguguucau

SEQ ID NO: 2759 - RNA, 19 nt, artificial
  Chemically Synthesized
gaguuaaugucaaaugaca

SEQ ID NO: 2760 - RNA, 19 nt, artificial
  Chemically Synthesized
auguuauaacugaacccaa

SEQ ID NO: 2761 - RNA, 19 nt, artificial
  Chemically Synthesized
ugucuauuucugcauucaa

SEQ ID NO: 2762 - RNA, 19 nt, artificial
  Chemically Synthesized
gcgugaauaccagaaggau

SEQ ID NO: 2763 - RNA, 19 nt, artificial
  Chemically Synthesized
caaagguggagcgugaaua

SEQ ID NO: 2764 - RNA, 19 nt, artificial
  Chemically Synthesized
ccugcuauacaacaugaac

SEQ ID NO: 2765 - RNA, 19 nt, artificial
  Chemically Synthesized
gauguacuuauucaugcua

SEQ ID NO: 2766 - RNA, 19 nt, artificial
  Chemically Synthesized
gaaggauccaguauucagu

SEQ ID NO: 2767 - RNA, 19 nt, artificial
  Chemically Synthesized
accagugcuuugauuuuua

SEQ ID NO: 2768 - RNA, 19 nt, artificial
  Chemically Synthesized
ggaccagugcuuugauuuu

SEQ ID NO: 2769 - RNA, 19 nt, artificial
  Chemically Synthesized
uguguuuauugaaugguga

SEQ ID NO: 2770 - RNA, 19 nt, artificial
  Chemically Synthesized
gacugcuacuccaagcuca

SEQ ID NO: 2771 - RNA, 19 nt, artificial
  Chemically Synthesized
ucugcauucaaaaguguaa

SEQ ID NO: 2772 - RNA, 19 nt, artificial
  Chemically Synthesized
cuuugcacaacaacaacaa

SEQ ID NO: 2773 - RNA, 19 nt, artificial
  Chemically Synthesized
aaugucaaaugacagcaaa

SEQ ID NO: 2774 - RNA, 19 nt, artificial
  Chemically Synthesized
gcuuuauuucagaggacca

SEQ ID NO: 2775 - RNA, 19 nt, artificial
  Chemically Synthesized
acugaaugcuguguauaua

SEQ ID NO: 2776 - RNA, 19 nt, artificial
  Chemically Synthesized
acccgaugagccugcuaua

SEQ ID NO: 2777 - RNA, 19 nt, artificial
  Chemically Synthesized
agaggaccagugcuuugau

SEQ ID NO: 2778 - RNA, 19 nt, artificial
  Chemically Synthesized
aaaccuugugaacucuuua

SEQ ID NO: 2779 - RNA, 19 nt, artificial
  Chemically Synthesized
aacaugaacgacugcuacu

SEQ ID NO: 2780 - RNA, 19 nt, artificial
  Chemically Synthesized
aguuggaagguuuucuuua

SEQ ID NO: 2781 - RNA, 19 nt, artificial
  Chemically Synthesized
cuuggacugugauauucgu

SEQ ID NO: 2782 - RNA, 19 nt, artificial
  Chemically Synthesized
ccaggguguucucuuacuu

SEQ ID NO: 2783 - RNA, 19 nt, artificial
  Chemically Synthesized
cacaaggaggacaaguuga

SEQ ID NO: 2784 - RNA, 19 nt, artificial
  Chemically Synthesized
acaugaacgacugcuacuc

SEQ ID NO: 2785 - RNA, 19 nt, artificial
  Chemically Synthesized
gcaagauggaaauccugca

SEQ ID NO: 2786 - RNA, 19 nt, artificial
  Chemically Synthesized
gaaaccuugugaacucuuu

SEQ ID NO: 2787 - RNA, 19 nt, artificial
  Chemically Synthesized
gcaguuggaagguuuucuu

SEQ ID NO: 2788 - RNA, 19 nt, artificial
  Chemically Synthesized
cuauugucagccugcauca

SEQ ID NO: 2789 - RNA, 19 nt, artificial
  Chemically Synthesized
ccacuauugucagccugca

SEQ ID NO: 2790 - RNA, 19 nt, artificial
  Chemically Synthesized
agagaugucuauuucugca

SEQ ID NO: 2791 - RNA, 19 nt, artificial
  Chemically Synthesized
cugaaugcuguguauauau

SEQ ID NO: 2792 - RNA, 19 nt, artificial
  Chemically Synthesized
uugacacaagccuacugaa

SEQ ID NO: 2793 - RNA, 19 nt, artificial
  Chemically Synthesized
ugcacaacaacaacaacaa

SEQ ID NO: 2794 - RNA, 19 nt, artificial
  Chemically Synthesized
guuauaacugaacccaaau

SEQ ID NO: 2795 - RNA, 19 nt, artificial
  Chemically Synthesized
uugagugaaaccuugugaa

SEQ ID NO: 2796 - RNA, 19 nt, artificial
  Chemically Synthesized
uuucaaagguggagcguga

SEQ ID NO: 2797 - RNA, 19 nt, artificial
  Chemically Synthesized
gaaugaucaucuucccagg

SEQ ID NO: 2798 - RNA, 19 nt, artificial
  Chemically Synthesized
aaagcacuguguggcugaa

SEQ ID NO: 2799 - RNA, 19 nt, artificial
  Chemically Synthesized
uugucagccugcaucacca

SEQ ID NO: 2800 - RNA, 19 nt, artificial
  Chemically Synthesized
agauggaaauccugcagca

SEQ ID NO: 2801 - RNA, 19 nt, artificial
  Chemically Synthesized
gaggaccagugcuuugauu

SEQ ID NO: 2802 - RNA, 19 nt, artificial
  Chemically Synthesized
gauccaguauucagucacu

SEQ ID NO: 2803 - RNA, 19 nt, artificial
  Chemically Synthesized
gguccguuaggaaaaacag

SEQ ID NO: 2804 - RNA, 19 nt, artificial
  Chemically Synthesized
gugauugccugcuuuauuu

SEQ ID NO: 2805 - RNA, 19 nt, artificial
  Chemically Synthesized
gaauggugauugccugcuu

SEQ ID NO: 2806 - RNA, 19 nt, artificial
  Chemically Synthesized
guguuuauugaauggugau

SEQ ID NO: 2807 - RNA, 19 nt, artificial
  Chemically Synthesized
agacuuugccuuuuuucaa

SEQ ID NO: 2808 - RNA, 19 nt, artificial
  Chemically Synthesized
ucucuuacuuggacuguga

SEQ ID NO: 2809 - RNA, 19 nt, artificial
  Chemically Synthesized
ggcagagaugucuauuucu

SEQ ID NO: 2810 - RNA, 19 nt, artificial
  Chemically Synthesized
caaagcacuguguggcuga

SEQ ID NO: 2811 - RNA, 19 nt, artificial
  Chemically Synthesized
caagccuacugaaugcugu

SEQ ID NO: 2812 - RNA, 19 nt, artificial
  Chemically Synthesized
uggagcgugaauaccagaa

SEQ ID NO: 2813 - RNA, 19 nt, artificial
  Chemically Synthesized
uucccaggguguucucuua

SEQ ID NO: 2814 - RNA, 19 nt, artificial
  Chemically Synthesized
uaaugucaaaugacagcaa

SEQ ID NO: 2815 - RNA, 19 nt, artificial
  Chemically Synthesized
cagaggaccagugcuuuga

SEQ ID NO: 2816 - RNA, 19 nt, artificial
  Chemically Synthesized
ggagcgugaauaccagaag

SEQ ID NO: 2817 - RNA, 19 nt, artificial
  Chemically Synthesized
agcgaaaacguuaaaauca

SEQ ID NO: 2818 - RNA, 19 nt, artificial
  Chemically Synthesized
gagcgaaaacguuaaaauc

SEQ ID NO: 2819 - RNA, 19 nt, artificial
  Chemically Synthesized
caguuggaagguuuucuuu

SEQ ID NO: 2820 - RNA, 19 nt, artificial
  Chemically Synthesized
uggacugugauauucguua

SEQ ID NO: 2821 - RNA, 19 nt, artificial
  Chemically Synthesized
cccaggguguucucuuacu

SEQ ID NO: 2822 - RNA, 19 nt, artificial
  Chemically Synthesized
ggaaucuuuuaagugcuga

SEQ ID NO: 2823 - RNA, 19 nt, artificial
  Chemically Synthesized
caaaugacagcaaagcacu

SEQ ID NO: 2824 - RNA, 19 nt, artificial
  Chemically Synthesized
gauugccugcuuuauuuca

SEQ ID NO: 2825 - RNA, 19 nt, artificial
  Chemically Synthesized
guuguaaacuuaacccuuu

SEQ ID NO: 2826 - RNA, 19 nt, artificial
  Chemically Synthesized
aaccuugugaacucuuuaa

SEQ ID NO: 2827 - RNA, 19 nt, artificial
  Chemically Synthesized
uacugaaugcuguguauau

SEQ ID NO: 2828 - RNA, 19 nt, artificial
  Chemically Synthesized
aagucuuuuggucagaaau

SEQ ID NO: 2829 - RNA, 19 nt, artificial
  Chemically Synthesized
ugcccuuucugcaguugga

SEQ ID NO: 2830 - RNA, 19 nt, artificial
  Chemically Synthesized
uggaaggaaaacuaagaau

SEQ ID NO: 2831 - RNA, 19 nt, artificial
  Chemically Synthesized
aguuguaaacuuaacccuu

SEQ ID NO: 2832 - RNA, 19 nt, artificial
  Chemically Synthesized
gccuacugaaugcugugua

SEQ ID NO: 2833 - RNA, 19 nt, artificial
  Chemically Synthesized
aaaugaagucuuuugguca

SEQ ID NO: 2834 - RNA, 19 nt, artificial
  Chemically Synthesized
cagacuuugccuuuuuuca

SEQ ID NO: 2835 - RNA, 19 nt, artificial
  Chemically Synthesized
acaaauucacggaaucuuu

SEQ ID NO: 2836 - RNA, 19 nt, artificial
  Chemically Synthesized
gguguucaugauuucuuuu

SEQ ID NO: 2837 - RNA, 19 nt, artificial
  Chemically Synthesized
agguccguuaggaaaaaca

SEQ ID NO: 2838 - RNA, 19 nt, artificial
  Chemically Synthesized
acuacaucuuggaccugca

SEQ ID NO: 2839 - RNA, 19 nt, artificial
  Chemically Synthesized
ccugcuuuauuucagagga

SEQ ID NO: 2840 - RNA, 19 nt, artificial
  Chemically Synthesized
agaugucuauuucugcauu

SEQ ID NO: 2841 - RNA, 19 nt, artificial
  Chemically Synthesized
cuauuugagugaaaccuug

SEQ ID NO: 2842 - RNA, 19 nt, artificial
  Chemically Synthesized
guggagcgugaauaccaga

SEQ ID NO: 2843 - RNA, 19 nt, artificial
  Chemically Synthesized
gccuuuuuucaaaggugga

SEQ ID NO: 2844 - RNA, 19 nt, artificial
  Chemically Synthesized
cucuuacuuggacugugau

SEQ ID NO: 2845 - RNA, 19 nt, artificial
  Chemically Synthesized
ucaucgacuacaucuugga

SEQ ID NO: 2846 - RNA, 19 nt, artificial
  Chemically Synthesized
gaacaagaaggugagcaag

SEQ ID NO: 2847 - RNA, 19 nt, artificial
  Chemically Synthesized
cugcauucaaaaguguaau

SEQ ID NO: 2848 - RNA, 19 nt, artificial
  Chemically Synthesized
agguggagcgugaauacca

SEQ ID NO: 2849 - RNA, 19 nt, artificial
  Chemically Synthesized
ucuuacuuggacugugaua

SEQ ID NO: 2850 - RNA, 19 nt, artificial
  Chemically Synthesized
ccauuucacaaggaggaca

SEQ ID NO: 2851 - RNA, 19 nt, artificial
  Chemically Synthesized
cccuucugaguuaauguca

SEQ ID NO: 2852 - RNA, 19 nt, artificial
  Chemically Synthesized
uccaguauucagucacuua

SEQ ID NO: 2853 - RNA, 19 nt, artificial
  Chemically Synthesized
ucugcaguuggaagguuuu

SEQ ID NO: 2854 - RNA, 19 nt, artificial
  Chemically Synthesized
gacugugauauucguuauu

SEQ ID NO: 2855 - RNA, 19 nt, artificial
  Chemically Synthesized
cccucaacacggauaucag

SEQ ID NO: 2856 - RNA, 19 nt, artificial
  Chemically Synthesized
gcuacuccaagcucaagga

SEQ ID NO: 2857 - RNA, 19 nt, artificial
  Chemically Synthesized
gucuuuuggucagaaauua

SEQ ID NO: 2858 - RNA, 19 nt, artificial
  Chemically Synthesized
auaccagaaggauccagua

SEQ ID NO: 2859 - RNA, 19 nt, artificial
  Chemically Synthesized
ucuuuuaagugcugaacuu

SEQ ID NO: 2860 - RNA, 19 nt, artificial
  Chemically Synthesized
acaacaacaaauucacgga

SEQ ID NO: 2861 - RNA, 19 nt, artificial
  Chemically Synthesized
aaauccugcagcacgucau

SEQ ID NO: 2862 - RNA, 19 nt, artificial
  Chemically Synthesized
cccaaauaaauacaaguuc

SEQ ID NO: 2863 - RNA, 19 nt, artificial
  Chemically Synthesized
cuacugaaugcuguguaua

SEQ ID NO: 2864 - RNA, 19 nt, artificial
  Chemically Synthesized
ggucagaaauuaccuuuuu

SEQ ID NO: 2865 - RNA, 19 nt, artificial
  Chemically Synthesized
ugaagucuuuuggucagaa

SEQ ID NO: 2866 - RNA, 19 nt, artificial
  Chemically Synthesized
agaaggauccaguauucag

SEQ ID NO: 2867 - RNA, 19 nt, artificial
  Chemically Synthesized
ucaaagguggagcgugaau

SEQ ID NO: 2868 - RNA, 19 nt, artificial
  Chemically Synthesized
uucaaagguggagcgugaa

SEQ ID NO: 2869 - RNA, 19 nt, artificial
  Chemically Synthesized
ggaaggaaaacuaagaaug

SEQ ID NO: 2870 - RNA, 19 nt, artificial
  Chemically Synthesized
gcugaauaagcgguguuca

SEQ ID NO: 2871 - RNA, 19 nt, artificial
  Chemically Synthesized
cacuguguggcugaauaag

SEQ ID NO: 2872 - RNA, 19 nt, artificial
  Chemically Synthesized
caggcuucugaauucccuu

SEQ ID NO: 2873 - RNA, 19 nt, artificial
  Chemically Synthesized
gaaauccugcagcacguca

SEQ ID NO: 2874 - RNA, 19 nt, artificial
  Chemically Synthesized
aauggugauugccugcuuu

SEQ ID NO: 2875 - RNA, 19 nt, artificial
  Chemically Synthesized
uuucuuguauaguggcaga

SEQ ID NO: 2876 - RNA, 19 nt, artificial
  Chemically Synthesized
cagaaauuaccuuuuugac

SEQ ID NO: 2877 - RNA, 19 nt, artificial
  Chemically Synthesized
gcaggcuucugaauucccu

SEQ ID NO: 2878 - RNA, 19 nt, artificial
  Chemically Synthesized
ucagcauccuguccuugca

SEQ ID NO: 2879 - RNA, 19 nt, artificial
  Chemically Synthesized
cacuauugucagccugcau

SEQ ID NO: 2880 - RNA, 19 nt, artificial
  Chemically Synthesized
ucuuguauaguggcagaga

SEQ ID NO: 2881 - RNA, 19 nt, artificial
  Chemically Synthesized
aaagguggagcgugaauac

SEQ ID NO: 2882 - RNA, 19 nt, artificial
  Chemically Synthesized
aucacaaggaauugcccaa

SEQ ID NO: 2883 - RNA, 19 nt, artificial
  Chemically Synthesized
gcgaaaacguuaaaaucac

SEQ ID NO: 2884 - RNA, 19 nt, artificial
  Chemically Synthesized
caaauucacggaaucuuuu

SEQ ID NO: 2885 - RNA, 19 nt, artificial
  Chemically Synthesized
auaucagcauccuguccuu

SEQ ID NO: 2886 - RNA, 19 nt, artificial
  Chemically Synthesized
ccucaacacggauaucagc

SEQ ID NO: 2887 - RNA, 19 nt, artificial
  Chemically Synthesized
uggaaauccugcagcacgu

SEQ ID NO: 2888 - RNA, 19 nt, artificial
  Chemically Synthesized
guguguuuauugaauggug

SEQ ID NO: 2889 - RNA, 19 nt, artificial
  Chemically Synthesized
gcauucaaaaguguaauga

SEQ ID NO: 2890 - RNA, 19 nt, artificial
  Chemically Synthesized
gagugaaaccuugugaacu

SEQ ID NO: 2891 - RNA, 19 nt, artificial
  Chemically Synthesized
aggaauugcccaaucuaag

SEQ ID NO: 2892 - RNA, 19 nt, artificial
  Chemically Synthesized
aaccauuucacaaggagga

SEQ ID NO: 2893 - RNA, 19 nt, artificial
  Chemically Synthesized
caaccauuucacaaggagg

SEQ ID NO: 2894 - RNA, 19 nt, artificial
  Chemically Synthesized
gcgguguucaugauuucuu

SEQ ID NO: 2895 - RNA, 19 nt, artificial
  Chemically Synthesized
ccuugcaggcuucugaauu

SEQ ID NO: 2896 - RNA, 19 nt, artificial
  Chemically Synthesized
ccacccucaacacggauau

SEQ ID NO: 2897 - RNA, 19 nt, artificial
  Chemically Synthesized
acaucuuggaccugcagau

SEQ ID NO: 2898 - RNA, 19 nt, artificial
  Chemically Synthesized
cccuuucugcaguuggaag

SEQ ID NO: 2899 - RNA, 19 nt, artificial
  Chemically Synthesized
uauucuuugcacaacaaca

SEQ ID NO: 2900 - RNA, 19 nt, artificial
  Chemically Synthesized
uguccuugcaggcuucuga

SEQ ID NO: 2901 - RNA, 19 nt, artificial
  Chemically Synthesized
ucaacacggauaucagcau

SEQ ID NO: 2902 - RNA, 19 nt, artificial
  Chemically Synthesized
cugaacccaaauaaauaca

SEQ ID NO: 2903 - RNA, 19 nt, artificial
  Chemically Synthesized
caaguguguuuauugaaug

SEQ ID NO: 2904 - RNA, 19 nt, artificial
  Chemically Synthesized
gagaugucuauuucugcau

SEQ ID NO: 2905 - RNA, 19 nt, artificial
  Chemically Synthesized
guuuucuuguauaguggca

SEQ ID NO: 2906 - RNA, 19 nt, artificial
  Chemically Synthesized
accuugugaacucuuuaau

SEQ ID NO: 2907 - RNA, 19 nt, artificial
  Chemically Synthesized
cccaaucuaagcagacuuu

SEQ ID NO: 2908 - RNA, 19 nt, artificial
  Chemically Synthesized
acuuuuaaaugcccuuucu

SEQ ID NO: 2909 - RNA, 19 nt, artificial
  Chemically Synthesized
gugcugaacuuauuuuuca

SEQ ID NO: 2910 - RNA, 19 nt, artificial
  Chemically Synthesized
cggaaucuuuuaagugcug

SEQ ID NO: 2911 - RNA, 19 nt, artificial
  Chemically Synthesized
gucaaaugacagcaaagca

SEQ ID NO: 2912 - RNA, 19 nt, artificial
  Chemically Synthesized
uggugauugccugcuuuau

SEQ ID NO: 2913 - RNA, 19 nt, artificial
  Chemically Synthesized
auggugauugccugcuuua

SEQ ID NO: 2914 - RNA, 19 nt, artificial
  Chemically Synthesized
guggcagagaugucuauuu

SEQ ID NO: 2915 - RNA, 19 nt, artificial
  Chemically Synthesized
gaguuuucuuguauagugg

SEQ ID NO: 2916 - RNA, 19 nt, artificial
  Chemically Synthesized
agucuuuuggucagaaauu

SEQ ID NO: 2917 - RNA, 19 nt, artificial
  Chemically Synthesized
auacaacaugaacgacugc

SEQ ID NO: 2918 - RNA, 19 nt, artificial
  Chemically Synthesized
gguguucucuuacuuggac

SEQ ID NO: 2919 - RNA, 19 nt, artificial
  Chemically Synthesized
caggguguucucuuacuug

SEQ ID NO: 2920 - RNA, 19 nt, artificial
  Chemically Synthesized
aaaacagccugucggacca

SEQ ID NO: 2921 - RNA, 19 nt, artificial
  Chemically Synthesized
cacaacaacaacaacaaca

SEQ ID NO: 2922 - RNA, 19 nt, artificial
  Chemically Synthesized
gaccagugcuuugauuuuu

SEQ ID NO: 2923 - RNA, 19 nt, artificial
  Chemically Synthesized
cagcaugaaagccuucagu

SEQ ID NO: 2924 - RNA, 19 nt, artificial
  Chemically Synthesized
acggaaucuuuuaagugcu

SEQ ID NO: 2925 - RNA, 19 nt, artificial
  Chemically Synthesized
aacaacaaauucacggaau

SEQ ID NO: 2926 - RNA, 19 nt, artificial
  Chemically Synthesized
caacaacaacaaauucacg

SEQ ID NO: 2927 - RNA, 19 nt, artificial
  Chemically Synthesized
acaacaacaacaaauucac

SEQ ID NO: 2928 - RNA, 19 nt, artificial
  Chemically Synthesized
auucuuugcacaacaacaa

SEQ ID NO: 2929 - RNA, 19 nt, artificial
  Chemically Synthesized
aacaagaaggugagcaaga

SEQ ID NO: 2930 - RNA, 19 nt, artificial
  Chemically Synthesized
gcaugaaagccuucagucc

SEQ ID NO: 2931 - RNA, 19 nt, artificial
  Chemically Synthesized
uugccugcuuuauuucaga

SEQ ID NO: 2932 - RNA, 19 nt, artificial
  Chemically Synthesized
aggauccaguauucaguca

SEQ ID NO: 2933 - RNA, 19 nt, artificial
  Chemically Synthesized
cagaaggauccaguauuca

SEQ ID NO: 2934 - RNA, 19 nt, artificial
  Chemically Synthesized
ccagaaggauccaguauuc

SEQ ID NO: 2935 - RNA, 19 nt, artificial
  Chemically Synthesized
agcagacuuugccuuuuuu

SEQ ID NO: 2936 - RNA, 19 nt, artificial
  Chemically Synthesized
cacggauaucagcauccug

SEQ ID NO: 2937 - RNA, 19 nt, artificial
  Chemically Synthesized
gaaauuaccuuuuugacac

SEQ ID NO: 2938 - RNA, 19 nt, artificial
  Chemically Synthesized
ugagccugcuauacaacau

SEQ ID NO: 2939 - RNA, 19 nt, artificial
  Chemically Synthesized
gaugagccugcuauacaac

SEQ ID NO: 2940 - RNA, 19 nt, artificial
  Chemically Synthesized
cuuacuuggacugugauau

SEQ ID NO: 2941 - RNA, 19 nt, artificial
  Chemically Synthesized
cuucccaggguguucucuu

SEQ ID NO: 2942 - RNA, 19 nt, artificial
  Chemically Synthesized
cuuuuaagugcugaacuua

SEQ ID NO: 2943 - RNA, 19 nt, artificial
  Chemically Synthesized
gcuucugaauucccuucug

SEQ ID NO: 2944 - RNA, 19 nt, artificial
  Chemically Synthesized
gagcaagauggaaauccug

SEQ ID NO: 2945 - RNA, 19 nt, artificial
  Chemically Synthesized
aggaccagugcuuugauuu

SEQ ID NO: 2946 - RNA, 19 nt, artificial
  Chemically Synthesized
cugcuuuauuucagaggac

SEQ ID NO: 2947 - RNA, 19 nt, artificial
  Chemically Synthesized
uaguggcagagaugucuau

SEQ ID NO: 2948 - RNA, 19 nt, artificial
  Chemically Synthesized
ucuauuugagugaaaccuu

SEQ ID NO: 2949 - RNA, 19 nt, artificial
  Chemically Synthesized
gucagaaauuaccuuuuug

SEQ ID NO: 2950 - RNA, 19 nt, artificial
  Chemically Synthesized
cgugaauaccagaaggauc

SEQ ID NO: 2951 - RNA, 19 nt, artificial
  Chemically Synthesized
auugcccaaucuaagcaga

SEQ ID NO: 2952 - RNA, 19 nt, artificial
  Chemically Synthesized
aacguuaaaaucacaagga

SEQ ID NO: 2953 - RNA, 19 nt, artificial
  Chemically Synthesized
uauauacuauucccaccau

SEQ ID NO: 2954 - RNA, 19 nt, artificial
  Chemically Synthesized
cuuuauauacuauucccac

SEQ ID NO: 2955 - RNA, 19 nt, artificial
  Chemically Synthesized
uuacuuggacugugauauu

SEQ ID NO: 2956 - RNA, 19 nt, artificial
  Chemically Synthesized
guguucucuuacuuggacu

SEQ ID NO: 2957 - RNA, 19 nt, artificial
  Chemically Synthesized
cucaacacggauaucagca

SEQ ID NO: 2958 - RNA, 19 nt, artificial
  Chemically Synthesized
ucgacuacaucuuggaccu

SEQ ID NO: 2959 - RNA, 19 nt, artificial
  Chemically Synthesized
aaagccuucagucccguga

SEQ ID NO: 2960 - RNA, 19 nt, artificial
  Chemically Synthesized
agcacgucaucgacuacau

SEQ ID NO: 2961 - RNA, 19 nt, artificial
  Chemically Synthesized
augucuauuucugcauuca

SEQ ID NO: 2962 - RNA, 19 nt, artificial
  Chemically Synthesized
agaguuuucuuguauagug

SEQ ID NO: 2963 - RNA, 19 nt, artificial
  Chemically Synthesized
gagcgugaauaccagaagg

SEQ ID NO: 2964 - RNA, 19 nt, artificial
  Chemically Synthesized
cuaagcagacuuugccuuu

SEQ ID NO: 2965 - RNA, 19 nt, artificial
  Chemically Synthesized
uucugcaguuggaagguuu

SEQ ID NO: 2966 - RNA, 19 nt, artificial
  Chemically Synthesized
acaacaaauucacggaauc

SEQ ID NO: 2967 - RNA, 19 nt, artificial
  Chemically Synthesized
aauucccuucugaguuaau

SEQ ID NO: 2968 - RNA, 19 nt, artificial
  Chemically Synthesized
caucgacuacaucuuggac

SEQ ID NO: 2969 - RNA, 19 nt, artificial
  Chemically Synthesized
ugcagcacgucaucgacua

SEQ ID NO: 2970 - RNA, 19 nt, artificial
  Chemically Synthesized
ugacacaagccuacugaau

SEQ ID NO: 2971 - RNA, 19 nt, artificial
  Chemically Synthesized
ucuuugcacaacaacaaca

SEQ ID NO: 2972 - RNA, 19 nt, artificial
  Chemically Synthesized
guggcugaauaagcggugu

SEQ ID NO: 2973 - RNA, 19 nt, artificial
  Chemically Synthesized
acggauaucagcauccugu

SEQ ID NO: 2974 - RNA, 19 nt, artificial
  Chemically Synthesized
acucgcaucccacuauugu

SEQ ID NO: 2975 - RNA, 19 nt, artificial
  Chemically Synthesized
ugagugaaaccuugugaac

SEQ ID NO: 2976 - RNA, 19 nt, artificial
  Chemically Synthesized
ucuuuuggucagaaauuac

SEQ ID NO: 2977 - RNA, 19 nt, artificial
  Chemically Synthesized
ggauccaguauucagucac

SEQ ID NO: 2978 - RNA, 19 nt, artificial
  Chemically Synthesized
gaucaucuucccagggugu

SEQ ID NO: 2979 - RNA, 19 nt, artificial
  Chemically Synthesized
cacggaaucuuuuaagugc

SEQ ID NO: 2980 - RNA, 19 nt, artificial
  Chemically Synthesized
guuaggaaaaacagccugu

SEQ ID NO: 2981 - RNA, 19 nt, artificial
  Chemically Synthesized
cggauaucagcauccuguc

SEQ ID NO: 2982 - RNA, 19 nt, artificial
  Chemically Synthesized
cagaacaagaaggugagca

SEQ ID NO: 2983 - RNA, 19 nt, artificial
  Chemically Synthesized
guauaguggcagagauguc

SEQ ID NO: 2984 - RNA, 19 nt, artificial
  Chemically Synthesized
augaagucuuuuggucaga

SEQ ID NO: 2985 - RNA, 19 nt, artificial
  Chemically Synthesized
gcccaaucuaagcagacuu

SEQ ID NO: 2986 - RNA, 19 nt, artificial
  Chemically Synthesized
gagccugcuauacaacaug

SEQ ID NO: 2987 - RNA, 19 nt, artificial
  Chemically Synthesized
ccguuaggaaaaacagccu

SEQ ID NO: 2988 - RNA, 19 nt, artificial
  Chemically Synthesized
cucgcaucccacuauuguc

SEQ ID NO: 2989 - RNA, 19 nt, artificial
  Chemically Synthesized
cccagaacaagaaggugag

SEQ ID NO: 2990 - RNA, 19 nt, artificial
  Chemically Synthesized
acuccaagcucaaggagcu

SEQ ID NO: 2991 - RNA, 19 nt, artificial
  Chemically Synthesized
uauuugagugaaaccuugu

SEQ ID NO: 2992 - RNA, 19 nt, artificial
  Chemically Synthesized
cuuuuugacacaagccuac

SEQ ID NO: 2993 - RNA, 19 nt, artificial
  Chemically Synthesized
aaugaagucuuuuggucag

SEQ ID NO: 2994 - RNA, 19 nt, artificial
  Chemically Synthesized
uacaacaugaacgacugcu

SEQ ID NO: 2995 - RNA, 19 nt, artificial
  Chemically Synthesized
aaucacaaggaauugccca

SEQ ID NO: 2996 - RNA, 19 nt, artificial
  Chemically Synthesized
aaaugcccuuucugcaguu

SEQ ID NO: 2997 - RNA, 19 nt, artificial
  Chemically Synthesized
aggguguucucuuacuugg

SEQ ID NO: 2998 - RNA, 19 nt, artificial
  Chemically Synthesized
cuguguggcugaauaagcg

SEQ ID NO: 2999 - RNA, 19 nt, artificial
  Chemically Synthesized
aguuaaugucaaaugacag

SEQ ID NO: 3000 - RNA, 19 nt, artificial
  Chemically Synthesized
cugaauucccuucugaguu

SEQ ID NO: 3001 - RNA, 19 nt, artificial
  Chemically Synthesized
gacucgcaucccacuauug

SEQ ID NO: 3002 - RNA, 19 nt, artificial
  Chemically Synthesized
aguggcagagaugucuauu

SEQ ID NO: 3003 - RNA, 19 nt, artificial
  Chemically Synthesized
uguauaguggcagagaugu

SEQ ID NO: 3004 - RNA, 19 nt, artificial
  Chemically Synthesized
ucagucacuuaaaugaagu

SEQ ID NO: 3005 - RNA, 19 nt, artificial
  Chemically Synthesized
ucagcaugaaagccuucag

SEQ ID NO: 3006 - RNA, 19 nt, artificial
  Chemically Synthesized
ucaaaugacagcaaagcac

SEQ ID NO: 3007 - RNA, 19 nt, artificial
  Chemically Synthesized
uacaucuuggaccugcaga

SEQ ID NO: 3008 - RNA, 19 nt, artificial
  Chemically Synthesized
ggucagcaugaaagccuuc

SEQ ID NO: 3009 - RNA, 19 nt, artificial
  Chemically Synthesized
acgucaucgacuacaucuu

SEQ ID NO: 3010 - RNA, 19 nt, artificial
  Chemically Synthesized
cuuuauuucagaggaccag

SEQ ID NO: 3011 - RNA, 19 nt, artificial
  Chemically Synthesized
auaguggcagagaugucua

SEQ ID NO: 3012 - RNA, 19 nt, artificial
  Chemically Synthesized
uuugagugaaaccuuguga

SEQ ID NO: 3013 - RNA, 19 nt, artificial
  Chemically Synthesized
cuuuuaaaugcccuuucug

SEQ ID NO: 3014 - RNA, 19 nt, artificial
  Chemically Synthesized
ugaucaucuucccagggug

SEQ ID NO: 3015 - RNA, 19 nt, artificial
  Chemically Synthesized
aggaaaacuaagaaugauc

SEQ ID NO: 3016 - RNA, 19 nt, artificial
  Chemically Synthesized
acugaacccaaauaaauac

SEQ ID NO: 3017 - RNA, 19 nt, artificial
  Chemically Synthesized
auuucagaggaccagugcu

SEQ ID NO: 3018 - RNA, 19 nt, artificial
  Chemically Synthesized
agcgugaauaccagaagga

SEQ ID NO: 3019 - RNA, 19 nt, artificial
  Chemically Synthesized
acaaggaauugcccaaucu

SEQ ID NO: 3020 - RNA, 19 nt, artificial
  Chemically Synthesized
uucacaaggaggacaaguu

SEQ ID NO: 3021 - RNA, 19 nt, artificial
  Chemically Synthesized
auuucacaaggaggacaag

SEQ ID NO: 3022 - RNA, 19 nt, artificial
  Chemically Synthesized
ucaaccauuucacaaggag

SEQ ID NO: 3023 - RNA, 19 nt, artificial
  Chemically Synthesized
agcgguguucaugauuucu

SEQ ID NO: 3024 - RNA, 19 nt, artificial
  Chemically Synthesized
ugacagcaaagcacugugu

SEQ ID NO: 3025 - RNA, 19 nt, artificial
  Chemically Synthesized
cgucaucgacuacaucuug

SEQ ID NO: 3026 - RNA, 19 nt, artificial
  Chemically Synthesized
aaguguguuuauugaaugg

SEQ ID NO: 3027 - RNA, 19 nt, artificial
  Chemically Synthesized
acgacugcuacuccaagcu

SEQ ID NO: 3028 - RNA, 19 nt, artificial
  Chemically Synthesized
uggucagaaauuaccuuuu

SEQ ID NO: 3029 - RNA, 19 nt, artificial
  Chemically Synthesized
accagaaggauccaguauu

SEQ ID NO: 3030 - RNA, 19 nt, artificial
  Chemically Synthesized
cugcuauacaacaugaacg

SEQ ID NO: 3031 - RNA, 19 nt, artificial
  Chemically Synthesized
ggaauugcccaaucuaagc

SEQ ID NO: 3032 - RNA, 19 nt, artificial
  Chemically Synthesized
cuuucugcaguuggaaggu

SEQ ID NO: 3033 - RNA, 19 nt, artificial
  Chemically Synthesized
guguggcugaauaagcggu

SEQ ID NO: 3034 - RNA, 19 nt, artificial
  Chemically Synthesized
ucagaggaccagugcuuug

SEQ ID NO: 3035 - RNA, 19 nt, artificial
  Chemically Synthesized
uucagaggaccagugcuuu

SEQ ID NO: 3036 - RNA, 19 nt, artificial
  Chemically Synthesized
auugaauggugauugccug

SEQ ID NO: 3037 - RNA, 19 nt, artificial
  Chemically Synthesized
augauguacuuauucaugc

SEQ ID NO: 3038 - RNA, 19 nt, artificial
  Chemically Synthesized
gcagagaugucuauuucug

SEQ ID NO: 3039 - RNA, 19 nt, artificial
  Chemically Synthesized
uuguauaguggcagagaug

SEQ ID NO: 3040 - RNA, 19 nt, artificial
  Chemically Synthesized
uucagucacuuaaaugaag

SEQ ID NO: 3041 - RNA, 19 nt, artificial
  Chemically Synthesized
guauucagucacuuaaaug

SEQ ID NO: 3042 - RNA, 19 nt, artificial
  Chemically Synthesized
ugaauaccagaaggaucca

SEQ ID NO: 3043 - RNA, 19 nt, artificial
  Chemically Synthesized
gcagacuuugccuuuuuuc

SEQ ID NO: 3044 - RNA, 19 nt, artificial
  Chemically Synthesized
caucuucccaggguguucu

SEQ ID NO: 3045 - RNA, 19 nt, artificial
  Chemically Synthesized
uucacggaaucuuuuaagu

SEQ ID NO: 3046 - RNA, 19 nt, artificial
  Chemically Synthesized
uucugaauucccuucugag

SEQ ID NO: 3047 - RNA, 19 nt, artificial
  Chemically Synthesized
uggacucgcaucccacuau

SEQ ID NO: 3048 - RNA, 19 nt, artificial
  Chemically Synthesized
cugcuacuccaagcucaag

SEQ ID NO: 3049 - RNA, 19 nt, artificial
  Chemically Synthesized
gaauugcccaaucuaagca

SEQ ID NO: 3050 - RNA, 19 nt, artificial
  Chemically Synthesized
ugcaguuggaagguuuucu

SEQ ID NO: 3051 - RNA, 19 nt, artificial
  Chemically Synthesized
uuuaaaugcccuuucugca

SEQ ID NO: 3052 - RNA, 19 nt, artificial
  Chemically Synthesized
auaagcgguguucaugauu

SEQ ID NO: 3053 - RNA, 19 nt, artificial
  Chemically Synthesized
gucagcaugaaagccuuca

SEQ ID NO: 3054 - RNA, 19 nt, artificial
  Chemically Synthesized
gagguccguuaggaaaaac

SEQ ID NO: 3055 - RNA, 19 nt, artificial
  Chemically Synthesized
gcuauguuauaacugaacc

SEQ ID NO: 3056 - RNA, 19 nt, artificial
  Chemically Synthesized
uucugcauucaaaagugua

SEQ ID NO: 3057 - RNA, 19 nt, artificial
  Chemically Synthesized
cagagaugucuauuucugc

SEQ ID NO: 3058 - RNA, 19 nt, artificial
  Chemically Synthesized
uauaguggcagagaugucu

SEQ ID NO: 3059 - RNA, 19 nt, artificial
  Chemically Synthesized
uuauauacuauucccacca

SEQ ID NO: 3060 - RNA, 19 nt, artificial
  Chemically Synthesized
aagaaugaucaucuuccca

SEQ ID NO: 3061 - RNA, 19 nt, artificial
  Chemically Synthesized
agugcugaacuuauuuuuc

SEQ ID NO: 3062 - RNA, 19 nt, artificial
  Chemically Synthesized
augucaaaugacagcaaag

SEQ ID NO: 3063 - RNA, 19 nt, artificial
  Chemically Synthesized
gaugucuauuucugcauuc

SEQ ID NO: 3064 - RNA, 19 nt, artificial
  Chemically Synthesized
uuugacacaagccuacuga

SEQ ID NO: 3065 - RNA, 19 nt, artificial
  Chemically Synthesized
cuuaaaugaagucuuuugg

SEQ ID NO: 3066 - RNA, 19 nt, artificial
  Chemically Synthesized
gucacuuaaaugaagucuu

SEQ ID NO: 3067 - RNA, 19 nt, artificial
  Chemically Synthesized
caaucuaagcagacuuugc

SEQ ID NO: 3068 - RNA, 19 nt, artificial
  Chemically Synthesized
ccaaucuaagcagacuuug

SEQ ID NO: 3069 - RNA, 19 nt, artificial
  Chemically Synthesized
aaacguuaaaaucacaagg

SEQ ID NO: 3070 - RNA, 19 nt, artificial
  Chemically Synthesized
auauacuauucccaccaug

SEQ ID NO: 3071 - RNA, 19 nt, artificial
  Chemically Synthesized
augagccugcuauacaaca

SEQ ID NO: 3072 - RNA, 19 nt, artificial
  Chemically Synthesized
ugaauaagcgguguucaug

SEQ ID NO: 3073 - RNA, 19 nt, artificial
  Chemically Synthesized
uggcagagaugucuauuuc

SEQ ID NO: 3074 - RNA, 19 nt, artificial
  Chemically Synthesized
gacacaagccuacugaaug

SEQ ID NO: 3075 - RNA, 19 nt, artificial
  Chemically Synthesized
cagucacuuaaaugaaguc

SEQ ID NO: 3076 - RNA, 19 nt, artificial
  Chemically Synthesized
aagcagacuuugccuuuuu

SEQ ID NO: 3077 - RNA, 19 nt, artificial
  Chemically Synthesized
uggcugaauaagcgguguu

SEQ ID NO: 3078 - RNA, 19 nt, artificial
  Chemically Synthesized
ucugaauucccuucugagu

SEQ ID NO: 3079 - RNA, 19 nt, artificial
  Chemically Synthesized
uccuugcaggcuucugaau

SEQ ID NO: 3080 - RNA, 19 nt, artificial
  Chemically Synthesized
cgacuacaucuuggaccug

SEQ ID NO: 3081 - RNA, 19 nt, artificial
  Chemically Synthesized
caagauggaaauccugcag

SEQ ID NO: 3082 - RNA, 19 nt, artificial
  Chemically Synthesized
caugaaagccuucaguccc

SEQ ID NO: 3083 - RNA, 19 nt, artificial
  Chemically Synthesized
cuauguuauaacugaaccc

SEQ ID NO: 3084 - RNA, 19 nt, artificial
  Chemically Synthesized
cuauuucugcauucaaaag

SEQ ID NO: 3085 - RNA, 19 nt, artificial
  Chemically Synthesized
ucacaaggaauugcccaau

SEQ ID NO: 3086 - RNA, 19 nt, artificial
  Chemically Synthesized
gacuuuuaaaugcccuuuc

SEQ ID NO: 3087 - RNA, 19 nt, artificial
  Chemically Synthesized
uucaaccauuucacaagga

SEQ ID NO: 3088 - RNA, 19 nt, artificial
  Chemically Synthesized
caacaaauucacggaaucu

SEQ ID NO: 3089 - RNA, 19 nt, artificial
  Chemically Synthesized
cguuaggaaaaacagccug

SEQ ID NO: 3090 - RNA, 19 nt, artificial
  Chemically Synthesized
agcaaagcacuguguggcu

SEQ ID NO: 3091 - RNA, 19 nt, artificial
  Chemically Synthesized
guccguuaggaaaaacagc

SEQ ID NO: 3092 - RNA, 19 nt, artificial
  Chemically Synthesized
cuacaucuuggaccugcag

SEQ ID NO: 3093 - RNA, 19 nt, artificial
  Chemically Synthesized
uauguuauaacugaaccca

SEQ ID NO: 3094 - RNA, 19 nt, artificial
  Chemically Synthesized
uuucagaggaccagugcuu

SEQ ID NO: 3095 - RNA, 19 nt, artificial
  Chemically Synthesized
caaaaguguaaugauguac

SEQ ID NO: 3096 - RNA, 19 nt, artificial
  Chemically Synthesized
gugaacucuuuaauuagag

SEQ ID NO: 3097 - RNA, 19 nt, artificial
  Chemically Synthesized
gugaaaccuugugaacucu

SEQ ID NO: 3098 - RNA, 19 nt, artificial
  Chemically Synthesized
uuuggucagaaauuaccuu

SEQ ID NO: 3099 - RNA, 19 nt, artificial
  Chemically Synthesized
ugccuuuuuucaaaggugg

SEQ ID NO: 3100 - RNA, 19 nt, artificial
  Chemically Synthesized
aagacuuuuaaaugcccuu

SEQ ID NO: 3101 - RNA, 19 nt, artificial
  Chemically Synthesized
acuuggacugugauauucg

SEQ ID NO: 3102 - RNA, 19 nt, artificial
  Chemically Synthesized
aaaugacagcaaagcacug

SEQ ID NO: 3103 - RNA, 19 nt, artificial
  Chemically Synthesized
uuuauuucagaggaccagu

SEQ ID NO: 3104 - RNA, 19 nt, artificial
  Chemically Synthesized
guacuuauucaugcuaaac

SEQ ID NO: 3105 - RNA, 19 nt, artificial
  Chemically Synthesized
aacgacugcuacuccaagc

SEQ ID NO: 3106 - RNA, 19 nt, artificial
  Chemically Synthesized
uuuucaaccauuucacaag

SEQ ID NO: 3107 - RNA, 19 nt, artificial
  Chemically Synthesized
aucuuuuaagugcugaacu

SEQ ID NO: 3108 - RNA, 19 nt, artificial
  Chemically Synthesized
ugaguuaaugucaaaugac

SEQ ID NO: 3109 - RNA, 19 nt, artificial
  Chemically Synthesized
uucccuucugaguuaaugu

SEQ ID NO: 3110 - RNA, 19 nt, artificial
  Chemically Synthesized
acacggauaucagcauccu

SEQ ID NO: 3111 - RNA, 19 nt, artificial
  Chemically Synthesized
cgcaucccacuauugucag

SEQ ID NO: 3112 - RNA, 19 nt, artificial
  Chemically Synthesized
gauggaaauccugcagcac

SEQ ID NO: 3113 - RNA, 19 nt, artificial
  Chemically Synthesized
ccagaacaagaaggugagc

SEQ ID NO: 3114 - RNA, 19 nt, artificial
  Chemically Synthesized
uauugaauggugauugccu

SEQ ID NO: 3115 - RNA, 19 nt, artificial
  Chemically Synthesized
auuucugcauucaaaagug

SEQ ID NO: 3116 - RNA, 19 nt, artificial
  Chemically Synthesized
aauaccagaaggauccagu

SEQ ID NO: 3117 - RNA, 19 nt, artificial
  Chemically Synthesized
ugcccaaucuaagcagacu

SEQ ID NO: 3118 - RNA, 19 nt, artificial
  Chemically Synthesized
ggcugaauaagcgguguuc

SEQ ID NO: 3119 - RNA, 19 nt, artificial
  Chemically Synthesized
gucaucgacuacaucuugg

SEQ ID NO: 3120 - RNA, 19 nt, artificial
  Chemically Synthesized
cacgucaucgacuacaucu

SEQ ID NO: 3121 - RNA, 19 nt, artificial
  Chemically Synthesized
aauccugcagcacgucauc

SEQ ID NO: 3122 - RNA, 19 nt, artificial
  Chemically Synthesized
agugaaaccuugugaacuc

SEQ ID NO: 3123 - RNA, 19 nt, artificial
  Chemically Synthesized
uaagcagacuuugccuuuu

SEQ ID NO: 3124 - RNA, 19 nt, artificial
  Chemically Synthesized
uuggacugugauauucguu

SEQ ID NO: 3125 - RNA, 19 nt, artificial
  Chemically Synthesized
gcugaacuuauuuuucaac

SEQ ID NO: 3126 - RNA, 19 nt, artificial
  Chemically Synthesized
accacccucaacacggaua

SEQ ID NO: 3127 - RNA, 19 nt, artificial
  Chemically Synthesized
ugaaaccuugugaacucuu

SEQ ID NO: 3128 - RNA, 19 nt, artificial
  Chemically Synthesized
aaggauccaguauucaguc

SEQ ID NO: 3129 - RNA, 19 nt, artificial
  Chemically Synthesized
aaaucacaaggaauugccc

SEQ ID NO: 3130 - RNA, 19 nt, artificial
  Chemically Synthesized
cuuuuauucuuugcacaac

SEQ ID NO: 3131 - RNA, 19 nt, artificial
  Chemically Synthesized
aagcacuguguggcugaau

SEQ ID NO: 3132 - RNA, 19 nt, artificial
  Chemically Synthesized
auccuguccuugcaggcuu

SEQ ID NO: 3133 - RNA, 19 nt, artificial
  Chemically Synthesized
caacacggauaucagcauc

SEQ ID NO: 3134 - RNA, 19 nt, artificial
  Chemically Synthesized
cagcacgucaucgacuaca

SEQ ID NO: 3135 - RNA, 19 nt, artificial
  Chemically Synthesized
ugaaagccuucagucccgu

SEQ ID NO: 3136 - RNA, 19 nt, artificial
  Chemically Synthesized
ugauugccugcuuuauuuc

SEQ ID NO: 3137 - RNA, 19 nt, artificial
  Chemically Synthesized
ugcauucaaaaguguaaug

SEQ ID NO: 3138 - RNA, 19 nt, artificial
  Chemically Synthesized
uaccagaaggauccaguau

SEQ ID NO: 3139 - RNA, 19 nt, artificial
  Chemically Synthesized
uaaaugcccuuucugcagu

SEQ ID NO: 3140 - RNA, 19 nt, artificial
  Chemically Synthesized
cuaagaaugaucaucuucc

SEQ ID NO: 3141 - RNA, 19 nt, artificial
  Chemically Synthesized
gcaucccacuauugucagc

SEQ ID NO: 3142 - RNA, 19 nt, artificial
  Chemically Synthesized
aagaaggugagcaagaugg

SEQ ID NO: 3143 - RNA, 19 nt, artificial
  Chemically Synthesized
auuugagugaaaccuugug

SEQ ID NO: 3144 - RNA, 19 nt, artificial
  Chemically Synthesized
acacaagccuacugaaugc

SEQ ID NO: 3145 - RNA, 19 nt, artificial
  Chemically Synthesized
cugcaguuggaagguuuuc

SEQ ID NO: 3146 - RNA, 19 nt, artificial
  Chemically Synthesized
acagcaaagcacugugugg

SEQ ID NO: 3147 - RNA, 19 nt, artificial
  Chemically Synthesized
gacagcaaagcacugugug

SEQ ID NO: 3148 - RNA, 19 nt, artificial
  Chemically Synthesized
ggcuucugaauucccuucu

SEQ ID NO: 3149 - RNA, 19 nt, artificial
  Chemically Synthesized
uauugucagccugcaucac

SEQ ID NO: 3150 - RNA, 19 nt, artificial
  Chemically Synthesized
aucccacuauugucagccu

SEQ ID NO: 3151 - RNA, 19 nt, artificial
  Chemically Synthesized
uuuauugaauggugauugc

SEQ ID NO: 3152 - RNA, 19 nt, artificial
  Chemically Synthesized
aagccuacugaaugcugug

SEQ ID NO: 3153 - RNA, 19 nt, artificial
  Chemically Synthesized
uuuuggucagaaauuaccu

SEQ ID NO: 3154 - RNA, 19 nt, artificial
  Chemically Synthesized
ccuuuuuucaaagguggag

SEQ ID NO: 3155 - RNA, 19 nt, artificial
  Chemically Synthesized
acuuugccuuuuuucaaag

SEQ ID NO: 3156 - RNA, 19 nt, artificial
  Chemically Synthesized
ucccaggguguucucuuac

SEQ ID NO: 3157 - RNA, 19 nt, artificial
  Chemically Synthesized
ucaucuucccaggguguuc

SEQ ID NO: 3158 - RNA, 19 nt, artificial
  Chemically Synthesized
gaaaaacagccugucggac

SEQ ID NO: 3159 - RNA, 19 nt, artificial
  Chemically Synthesized
auucacggaaucuuuuaag

SEQ ID NO: 3160 - RNA, 19 nt, artificial
  Chemically Synthesized
uguggcugaauaagcggug

SEQ ID NO: 3161 - RNA, 19 nt, artificial
  Chemically Synthesized
guuaaugucaaaugacagc

SEQ ID NO: 3162 - RNA, 19 nt, artificial
  Chemically Synthesized
gauaucagcauccuguccu

SEQ ID NO: 3163 - RNA, 19 nt, artificial
  Chemically Synthesized
aguuuucuuguauaguggc

SEQ ID NO: 3164 - RNA, 19 nt, artificial
  Chemically Synthesized
aaagacuuuuaaaugcccu

SEQ ID NO: 3165 - RNA, 19 nt, artificial
  Chemically Synthesized
uaagaaugaucaucuuccc

SEQ ID NO: 3166 - RNA, 19 nt, artificial
  Chemically Synthesized
accauuucacaaggaggac

SEQ ID NO: 3167 - RNA, 19 nt, artificial
  Chemically Synthesized
uguguggcugaauaagcgg

SEQ ID NO: 3168 - RNA, 19 nt, artificial
  Chemically Synthesized
ggugagcaagauggaaauc

SEQ ID NO: 3169 - RNA, 19 nt, artificial
  Chemically Synthesized
guuuauugaauggugauug

SEQ ID NO: 3170 - RNA, 19 nt, artificial
  Chemically Synthesized
uguucucuuacuuggacug

SEQ ID NO: 3171 - RNA, 19 nt, artificial
  Chemically Synthesized
ggauaucagcauccugucc

SEQ ID NO: 3172 - RNA, 19 nt, artificial
  Chemically Synthesized
acuauugucagccugcauc

SEQ ID NO: 3173 - RNA, 19 nt, artificial
  Chemically Synthesized
ugcuauguuauaacugaac

SEQ ID NO: 3174 - RNA, 19 nt, artificial
  Chemically Synthesized
aguguguuuauugaauggu

SEQ ID NO: 3175 - RNA, 19 nt, artificial
  Chemically Synthesized
uugccuuuuuucaaaggug

SEQ ID NO: 3176 - RNA, 19 nt, artificial
  Chemically Synthesized
ccuuucugcaguuggaagg

SEQ ID NO: 3177 - RNA, 19 nt, artificial
  Chemically Synthesized
uuucacaaggaggacaagu

SEQ ID NO: 3178 - RNA, 19 nt, artificial
  Chemically Synthesized
uuucaaccauuucacaagg

SEQ ID NO: 3179 - RNA, 19 nt, artificial
  Chemically Synthesized
aggaaaaacagccugucgg

SEQ ID NO: 3180 - RNA, 19 nt, artificial
  Chemically Synthesized
gacuacaucuuggaccugc

SEQ ID NO: 3181 - RNA, 19 nt, artificial
  Chemically Synthesized
ugcuuuauuucagaggacc

SEQ ID NO: 3182 - RNA, 19 nt, artificial
  Chemically Synthesized
uaucuauuugagugaaacc

SEQ ID NO: 3183 - RNA, 19 nt, artificial
  Chemically Synthesized
accuuuuugacacaagccu

SEQ ID NO: 3184 - RNA, 19 nt, artificial
  Chemically Synthesized
uuaccuuuuugacacaagc

SEQ ID NO: 3185 - RNA, 19 nt, artificial
  Chemically Synthesized
uaaaugaagucuuuugguc

SEQ ID NO: 3186 - RNA, 19 nt, artificial
  Chemically Synthesized
aucuaagcagacuuugccu

SEQ ID NO: 3187 - RNA, 19 nt, artificial
  Chemically Synthesized
guucucuuacuuggacugu

SEQ ID NO: 3188 - RNA, 19 nt, artificial
  Chemically Synthesized
aacaaauucacggaaucuu

SEQ ID NO: 3189 - RNA, 19 nt, artificial
  Chemically Synthesized
uuauuucagaggaccagug

SEQ ID NO: 3190 - RNA, 19 nt, artificial
  Chemically Synthesized
uuucugcauucaaaagugu

SEQ ID NO: 3191 - RNA, 19 nt, artificial
  Chemically Synthesized
agacuuuuaaaugcccuuu

SEQ ID NO: 3192 - RNA, 19 nt, artificial
  Chemically Synthesized
uucucuuacuuggacugug

SEQ ID NO: 3193 - RNA, 19 nt, artificial
  Chemically Synthesized
ucuucccaggguguucucu

SEQ ID NO: 3194 - RNA, 19 nt, artificial
  Chemically Synthesized
agaaugaucaucuucccag

SEQ ID NO: 3195 - RNA, 19 nt, artificial
  Chemically Synthesized
aaucuuuuaagugcugaac

SEQ ID NO: 3196 - RNA, 19 nt, artificial
  Chemically Synthesized
auggaaauccugcagcacg

SEQ ID NO: 3197 - RNA, 19 nt, artificial
  Chemically Synthesized
uuuuugacacaagccuacu

SEQ ID NO: 3198 - RNA, 19 nt, artificial
  Chemically Synthesized
uuggucagaaauuaccuuu

SEQ ID NO: 3199 - RNA, 19 nt, artificial
  Chemically Synthesized
gaauaccagaaggauccag

SEQ ID NO: 3200 - RNA, 19 nt, artificial
  Chemically Synthesized
uugcacaacaacaacaaca

SEQ ID NO: 3201 - RNA, 19 nt, artificial
  Chemically Synthesized
uucuuugcacaacaacaac

SEQ ID NO: 3202 - RNA, 19 nt, artificial
  Chemically Synthesized
uuaaugucaaaugacagca

SEQ ID NO: 3203 - RNA, 19 nt, artificial
  Chemically Synthesized
cacccucaacacggauauc

SEQ ID NO: 3204 - RNA, 19 nt, artificial
  Chemically Synthesized
cuacuccaagcucaaggag

SEQ ID NO: 3205 - RNA, 19 nt, artificial
  Chemically Synthesized
uuucugcaguuggaagguu

SEQ ID NO: 3206 - RNA, 19 nt, artificial
  Chemically Synthesized
uaguuguaaacuuaacccu

SEQ ID NO: 3207 - RNA, 19 nt, artificial
  Chemically Synthesized
ucguucauguuguauagca

SEQ ID NO: 3208 - RNA, 19 nt, artificial
  Chemically Synthesized
uggaguagcagucguucau

SEQ ID NO: 3209 - RNA, 19 nt, artificial
  Chemically Synthesized
uagcagucguucauguugu

SEQ ID NO: 3210 - RNA, 19 nt, artificial
  Chemically Synthesized
uuuggguucaguuauaaca

SEQ ID NO: 3211 - RNA, 19 nt, artificial
  Chemically Synthesized
uucauguuguauagcaggc

SEQ ID NO: 3212 - RNA, 19 nt, artificial
  Chemically Synthesized
uugacauuaacucagaagg

SEQ ID NO: 3213 - RNA, 19 nt, artificial
  Chemically Synthesized
uuugaaugcagaaauagac

SEQ ID NO: 3214 - RNA, 19 nt, artificial
  Chemically Synthesized
ugugauuuuaacguuuucg

SEQ ID NO: 3215 - RNA, 19 nt, artificial
  Chemically Synthesized
uuggaguagcagucguuca

SEQ ID NO: 3216 - RNA, 19 nt, artificial
  Chemically Synthesized
guagcagucguucauguug

SEQ ID NO: 3217 - RNA, 19 nt, artificial
  Chemically Synthesized
agucguucauguuguauag

SEQ ID NO: 3218 - RNA, 19 nt, artificial
  Chemically Synthesized
cagucguucauguuguaua

SEQ ID NO: 3219 - RNA, 19 nt, artificial
  Chemically Synthesized
auuccuugugauuuuaacg

SEQ ID NO: 3220 - RNA, 19 nt, artificial
  Chemically Synthesized
ucauucuuaguuuuccuuc

SEQ ID NO: 3221 - RNA, 19 nt, artificial
  Chemically Synthesized
uucagcacuuaaaagauuc

SEQ ID NO: 3222 - RNA, 19 nt, artificial
  Chemically Synthesized
uuugaaaaaaggcaaaguc

SEQ ID NO: 3223 - RNA, 19 nt, artificial
  Chemically Synthesized
aaggcuuucaugcugaccg

SEQ ID NO: 3224 - RNA, 19 nt, artificial
  Chemically Synthesized
uuccuugugauuuuaacgu

SEQ ID NO: 3225 - RNA, 19 nt, artificial
  Chemically Synthesized
uccaaguaagagaacaccc

SEQ ID NO: 3226 - RNA, 19 nt, artificial
  Chemically Synthesized
auacacagcauucaguagg

SEQ ID NO: 3227 - RNA, 19 nt, artificial
  Chemically Synthesized
uuucugaccaaaagacuuc

SEQ ID NO: 3228 - RNA, 19 nt, artificial
  Chemically Synthesized
uuaagugacugaauacugg

SEQ ID NO: 3229 - RNA, 19 nt, artificial
  Chemically Synthesized
uuuaagugacugaauacug

SEQ ID NO: 3230 - RNA, 19 nt, artificial
  Chemically Synthesized
uagauugggcaauuccuug

SEQ ID NO: 3231 - RNA, 19 nt, artificial
  Chemically Synthesized
cuuggaguagcagucguuc

SEQ ID NO: 3232 - RNA, 19 nt, artificial
  Chemically Synthesized
auuuuaacguuuucgcucc

SEQ ID NO: 3233 - RNA, 19 nt, artificial
  Chemically Synthesized
cuuguauuuauuuggguuc

SEQ ID NO: 3234 - RNA, 19 nt, artificial
  Chemically Synthesized
gucguucauguuguauagc

SEQ ID NO: 3235 - RNA, 19 nt, artificial
  Chemically Synthesized
uuagauugggcaauuccuu

SEQ ID NO: 3236 - RNA, 19 nt, artificial
  Chemically Synthesized
uccaucuugcucaccuucu

SEQ ID NO: 3237 - RNA, 19 nt, artificial
  Chemically Synthesized
uugagcuuggaguagcagu

SEQ ID NO: 3238 - RNA, 19 nt, artificial
  Chemically Synthesized
uuuuaacguuuucgcuccc

SEQ ID NO: 3239 - RNA, 19 nt, artificial
  Chemically Synthesized
auaacgaauaucacagucc

SEQ ID NO: 3240 - RNA, 19 nt, artificial
  Chemically Synthesized
auaaaaaucaaagcacugg

SEQ ID NO: 3241 - RNA, 19 nt, artificial
  Chemically Synthesized
ggaguagcagucguucaug

SEQ ID NO: 3242 - RNA, 19 nt, artificial
  Chemically Synthesized
uaggcuugugucaaaaagg

SEQ ID NO: 3243 - RNA, 19 nt, artificial
  Chemically Synthesized
uucagaagccugcaaggac

SEQ ID NO: 3244 - RNA, 19 nt, artificial
  Chemically Synthesized
uuuuuccuaacggaccuca

SEQ ID NO: 3245 - RNA, 19 nt, artificial
  Chemically Synthesized
ugaucauucuuaguuuucc

SEQ ID NO: 3246 - RNA, 19 nt, artificial
  Chemically Synthesized
uuuuccuaacggaccucac

SEQ ID NO: 3247 - RNA, 19 nt, artificial
  Chemically Synthesized
auaaagaaaaccuuccaac

SEQ ID NO: 3248 - RNA, 19 nt, artificial
  Chemically Synthesized
uuguccuccuugugaaaug

SEQ ID NO: 3249 - RNA, 19 nt, artificial
  Chemically Synthesized
uccgacaggcuguuuuucc

SEQ ID NO: 3250 - RNA, 19 nt, artificial
  Chemically Synthesized
auuuccaucuugcucaccu

SEQ ID NO: 3251 - RNA, 19 nt, artificial
  Chemically Synthesized
aauaaagcaggcaaucacc

SEQ ID NO: 3252 - RNA, 19 nt, artificial
  Chemically Synthesized
agcaugaauaaguacauca

SEQ ID NO: 3253 - RNA, 19 nt, artificial
  Chemically Synthesized
aucucugccacuauacaag

SEQ ID NO: 3254 - RNA, 19 nt, artificial
  Chemically Synthesized
aauuaaagaguucacaagg

SEQ ID NO: 3255 - RNA, 19 nt, artificial
  Chemically Synthesized
ucauguuguauagcaggcu

SEQ ID NO: 3256 - RNA, 19 nt, artificial
  Chemically Synthesized
uuccaacugcagaaagggc

SEQ ID NO: 3257 - RNA, 19 nt, artificial
  Chemically Synthesized
uuccgugaauuuguuguug

SEQ ID NO: 3258 - RNA, 19 nt, artificial
  Chemically Synthesized
augaacaccgcuuauucag

SEQ ID NO: 3259 - RNA, 19 nt, artificial
  Chemically Synthesized
ugucauuugacauuaacuc

SEQ ID NO: 3260 - RNA, 19 nt, artificial
  Chemically Synthesized
uuggguucaguuauaacau

SEQ ID NO: 3261 - RNA, 19 nt, artificial
  Chemically Synthesized
uugaaugcagaaauagaca

SEQ ID NO: 3262 - RNA, 19 nt, artificial
  Chemically Synthesized
auccuucugguauucacgc

SEQ ID NO: 3263 - RNA, 19 nt, artificial
  Chemically Synthesized
uauucacgcuccaccuuug

SEQ ID NO: 3264 - RNA, 19 nt, artificial
  Chemically Synthesized
guucauguuguauagcagg

SEQ ID NO: 3265 - RNA, 19 nt, artificial
  Chemically Synthesized
uagcaugaauaaguacauc

SEQ ID NO: 3266 - RNA, 19 nt, artificial
  Chemically Synthesized
acugaauacuggauccuuc

SEQ ID NO: 3267 - RNA, 19 nt, artificial
  Chemically Synthesized
uaaaaaucaaagcacuggu

SEQ ID NO: 3268 - RNA, 19 nt, artificial
  Chemically Synthesized
aaaaucaaagcacuggucc

SEQ ID NO: 3269 - RNA, 19 nt, artificial
  Chemically Synthesized
ucaccauucaauaaacaca

SEQ ID NO: 3270 - RNA, 19 nt, artificial
  Chemically Synthesized
ugagcuuggaguagcaguc

SEQ ID NO: 3271 - RNA, 19 nt, artificial
  Chemically Synthesized
uuacacuuuugaaugcaga

SEQ ID NO: 3272 - RNA, 19 nt, artificial
  Chemically Synthesized
uuguuguuguugugcaaag

SEQ ID NO: 3273 - RNA, 19 nt, artificial
  Chemically Synthesized
uuugcugucauuugacauu

SEQ ID NO: 3274 - RNA, 19 nt, artificial
  Chemically Synthesized
ugguccucugaaauaaagc

SEQ ID NO: 3275 - RNA, 19 nt, artificial
  Chemically Synthesized
uauauacacagcauucagu

SEQ ID NO: 3276 - RNA, 19 nt, artificial
  Chemically Synthesized
uauagcaggcucaucgggu

SEQ ID NO: 3277 - RNA, 19 nt, artificial
  Chemically Synthesized
aucaaagcacugguccucu

SEQ ID NO: 3278 - RNA, 19 nt, artificial
  Chemically Synthesized
uaaagaguucacaagguuu

SEQ ID NO: 3279 - RNA, 19 nt, artificial
  Chemically Synthesized
aguagcagucguucauguu

SEQ ID NO: 3280 - RNA, 19 nt, artificial
  Chemically Synthesized
uaaagaaaaccuuccaacu

SEQ ID NO: 3281 - RNA, 19 nt, artificial
  Chemically Synthesized
acgaauaucacaguccaag

SEQ ID NO: 3282 - RNA, 19 nt, artificial
  Chemically Synthesized
aaguaagagaacacccugg

SEQ ID NO: 3283 - RNA, 19 nt, artificial
  Chemically Synthesized
ucaacuuguccuccuugug

SEQ ID NO: 3284 - RNA, 19 nt, artificial
  Chemically Synthesized
gaguagcagucguucaugu

SEQ ID NO: 3285 - RNA, 19 nt, artificial
  Chemically Synthesized
ugcaggauuuccaucuugc

SEQ ID NO: 3286 - RNA, 19 nt, artificial
  Chemically Synthesized
aaagaguucacaagguuuc

SEQ ID NO: 3287 - RNA, 19 nt, artificial
  Chemically Synthesized
aagaaaaccuuccaacugc

SEQ ID NO: 3288 - RNA, 19 nt, artificial
  Chemically Synthesized
ugaugcaggcugacaauag

SEQ ID NO: 3289 - RNA, 19 nt, artificial
  Chemically Synthesized
ugcaggcugacaauagugg

SEQ ID NO: 3290 - RNA, 19 nt, artificial
  Chemically Synthesized
ugcagaaauagacaucucu

SEQ ID NO: 3291 - RNA, 19 nt, artificial
  Chemically Synthesized
auauauacacagcauucag

SEQ ID NO: 3292 - RNA, 19 nt, artificial
  Chemically Synthesized
uucaguaggcuugugucaa

SEQ ID NO: 3293 - RNA, 19 nt, artificial
  Chemically Synthesized
uuguuguuguuguugugca

SEQ ID NO: 3294 - RNA, 19 nt, artificial
  Chemically Synthesized
auuuggguucaguuauaac

SEQ ID NO: 3295 - RNA, 19 nt, artificial
  Chemically Synthesized
uucacaagguuucacucaa

SEQ ID NO: 3296 - RNA, 19 nt, artificial
  Chemically Synthesized
ucacgcuccaccuuugaaa

SEQ ID NO: 3297 - RNA, 19 nt, artificial
  Chemically Synthesized
ccugggaagaugaucauuc

SEQ ID NO: 3298 - RNA, 19 nt, artificial
  Chemically Synthesized
uucagccacacagugcuuu

SEQ ID NO: 3299 - RNA, 19 nt, artificial
  Chemically Synthesized
uggugaugcaggcugacaa

SEQ ID NO: 3300 - RNA, 19 nt, artificial
  Chemically Synthesized
ugcugcaggauuuccaucu

SEQ ID NO: 3301 - RNA, 19 nt, artificial
  Chemically Synthesized
aaucaaagcacugguccuc

SEQ ID NO: 3302 - RNA, 19 nt, artificial
  Chemically Synthesized
agugacugaauacuggauc

SEQ ID NO: 3303 - RNA, 19 nt, artificial
  Chemically Synthesized
cuguuuuuccuaacggacc

SEQ ID NO: 3304 - RNA, 19 nt, artificial
  Chemically Synthesized
aaauaaagcaggcaaucac

SEQ ID NO: 3305 - RNA, 19 nt, artificial
  Chemically Synthesized
aagcaggcaaucaccauuc

SEQ ID NO: 3306 - RNA, 19 nt, artificial
  Chemically Synthesized
aucaccauucaauaaacac

SEQ ID NO: 3307 - RNA, 19 nt, artificial
  Chemically Synthesized
uugaaaaaaggcaaagucu

SEQ ID NO: 3308 - RNA, 19 nt, artificial
  Chemically Synthesized
ucacaguccaaguaagaga

SEQ ID NO: 3309 - RNA, 19 nt, artificial
  Chemically Synthesized
agaaauagacaucucugcc

SEQ ID NO: 3310 - RNA, 19 nt, artificial
  Chemically Synthesized
ucagccacacagugcuuug

SEQ ID NO: 3311 - RNA, 19 nt, artificial
  Chemically Synthesized
acagcauucaguaggcuug

SEQ ID NO: 3312 - RNA, 19 nt, artificial
  Chemically Synthesized
uucugguauucacgcucca

SEQ ID NO: 3313 - RNA, 19 nt, artificial
  Chemically Synthesized
uaagagaacacccugggaa

SEQ ID NO: 3314 - RNA, 19 nt, artificial
  Chemically Synthesized
uugcugucauuugacauua

SEQ ID NO: 3315 - RNA, 19 nt, artificial
  Chemically Synthesized
ucaaagcacugguccucug

SEQ ID NO: 3316 - RNA, 19 nt, artificial
  Chemically Synthesized
cuucugguauucacgcucc

SEQ ID NO: 3317 - RNA, 19 nt, artificial
  Chemically Synthesized
ugauuuuaacguuuucgcu

SEQ ID NO: 3318 - RNA, 19 nt, artificial
  Chemically Synthesized
gauuuuaacguuuucgcuc

SEQ ID NO: 3319 - RNA, 19 nt, artificial
  Chemically Synthesized
aaagaaaaccuuccaacug

SEQ ID NO: 3320 - RNA, 19 nt, artificial
  Chemically Synthesized
uaacgaauaucacagucca

SEQ ID NO: 3321 - RNA, 19 nt, artificial
  Chemically Synthesized
aguaagagaacacccuggg

SEQ ID NO: 3322 - RNA, 19 nt, artificial
  Chemically Synthesized
ucagcacuuaaaagauucc

SEQ ID NO: 3323 - RNA, 19 nt, artificial
  Chemically Synthesized
agugcuuugcugucauuug

SEQ ID NO: 3324 - RNA, 19 nt, artificial
  Chemically Synthesized
ugaaauaaagcaggcaauc

SEQ ID NO: 3325 - RNA, 19 nt, artificial
  Chemically Synthesized
aaaggguuaaguuuacaac

SEQ ID NO: 3326 - RNA, 19 nt, artificial
  Chemically Synthesized
uuaaagaguucacaagguu

SEQ ID NO: 3327 - RNA, 19 nt, artificial
  Chemically Synthesized
auauacacagcauucagua

SEQ ID NO: 3328 - RNA, 19 nt, artificial
  Chemically Synthesized
auuucugaccaaaagacuu

SEQ ID NO: 3329 - RNA, 19 nt, artificial
  Chemically Synthesized
uccaacugcagaaagggca

SEQ ID NO: 3330 - RNA, 19 nt, artificial
  Chemically Synthesized
auucuuaguuuuccuucca

SEQ ID NO: 3331 - RNA, 19 nt, artificial
  Chemically Synthesized
aaggguuaaguuuacaacu

SEQ ID NO: 3332 - RNA, 19 nt, artificial
  Chemically Synthesized
uacacagcauucaguaggc

SEQ ID NO: 3333 - RNA, 19 nt, artificial
  Chemically Synthesized
ugaccaaaagacuucauuu

SEQ ID NO: 3334 - RNA, 19 nt, artificial
  Chemically Synthesized
ugaaaaaaggcaaagucug

SEQ ID NO: 3335 - RNA, 19 nt, artificial
  Chemically Synthesized
aaagauuccgugaauuugu

SEQ ID NO: 3336 - RNA, 19 nt, artificial
  Chemically Synthesized
aaaagaaaucaugaacacc

SEQ ID NO: 3337 - RNA, 19 nt, artificial
  Chemically Synthesized
uguuuuuccuaacggaccu

SEQ ID NO: 3338 - RNA, 19 nt, artificial
  Chemically Synthesized
ugcagguccaagauguagu

SEQ ID NO: 3339 - RNA, 19 nt, artificial
  Chemically Synthesized
uccucugaaauaaagcagg

SEQ ID NO: 3340 - RNA, 19 nt, artificial
  Chemically Synthesized
aaugcagaaauagacaucu

SEQ ID NO: 3341 - RNA, 19 nt, artificial
  Chemically Synthesized
caagguuucacucaaauag

SEQ ID NO: 3342 - RNA, 19 nt, artificial
  Chemically Synthesized
ucugguauucacgcuccac

SEQ ID NO: 3343 - RNA, 19 nt, artificial
  Chemically Synthesized
uccaccuuugaaaaaaggc

SEQ ID NO: 3344 - RNA, 19 nt, artificial
  Chemically Synthesized
aucacaguccaaguaagag

SEQ ID NO: 3345 - RNA, 19 nt, artificial
  Chemically Synthesized
uccaagauguagucgauga

SEQ ID NO: 3346 - RNA, 19 nt, artificial
  Chemically Synthesized
cuugcucaccuucuuguuc

SEQ ID NO: 3347 - RNA, 19 nt, artificial
  Chemically Synthesized
auuacacuuuugaaugcag

SEQ ID NO: 3348 - RNA, 19 nt, artificial
  Chemically Synthesized
ugguauucacgcuccaccu

SEQ ID NO: 3349 - RNA, 19 nt, artificial
  Chemically Synthesized
uaucacaguccaaguaaga

SEQ ID NO: 3350 - RNA, 19 nt, artificial
  Chemically Synthesized
uguccuccuugugaaaugg

SEQ ID NO: 3351 - RNA, 19 nt, artificial
  Chemically Synthesized
ugacauuaacucagaaggg

SEQ ID NO: 3352 - RNA, 19 nt, artificial
  Chemically Synthesized
uaagugacugaauacugga

SEQ ID NO: 3353 - RNA, 19 nt, artificial
  Chemically Synthesized
aaaaccuuccaacugcaga

SEQ ID NO: 3354 - RNA, 19 nt, artificial
  Chemically Synthesized
aauaacgaauaucacaguc

SEQ ID NO: 3355 - RNA, 19 nt, artificial
  Chemically Synthesized
cugauauccguguugaggg

SEQ ID NO: 3356 - RNA, 19 nt, artificial
  Chemically Synthesized
uccuugagcuuggaguagc

SEQ ID NO: 3357 - RNA, 19 nt, artificial
  Chemically Synthesized
uaauuucugaccaaaagac

SEQ ID NO: 3358 - RNA, 19 nt, artificial
  Chemically Synthesized
uacuggauccuucugguau

SEQ ID NO: 3359 - RNA, 19 nt, artificial
  Chemically Synthesized
aaguucagcacuuaaaaga

SEQ ID NO: 3360 - RNA, 19 nt, artificial
  Chemically Synthesized
uccgugaauuuguuguugu

SEQ ID NO: 3361 - RNA, 19 nt, artificial
  Chemically Synthesized
augacgugcugcaggauuu

SEQ ID NO: 3362 - RNA, 19 nt, artificial
  Chemically Synthesized
gaacuuguauuuauuuggg

SEQ ID NO: 3363 - RNA, 19 nt, artificial
  Chemically Synthesized
uauacacagcauucaguag

SEQ ID NO: 3364 - RNA, 19 nt, artificial
  Chemically Synthesized
aaaaagguaauuucugacc

SEQ ID NO: 3365 - RNA, 19 nt, artificial
  Chemically Synthesized
uucugaccaaaagacuuca

SEQ ID NO: 3366 - RNA, 19 nt, artificial
  Chemically Synthesized
cugaauacuggauccuucu

SEQ ID NO: 3367 - RNA, 19 nt, artificial
  Chemically Synthesized
auucacgcuccaccuuuga

SEQ ID NO: 3368 - RNA, 19 nt, artificial
  Chemically Synthesized
uucacgcuccaccuuugaa

SEQ ID NO: 3369 - RNA, 19 nt, artificial
  Chemically Synthesized
cauucuuaguuuuccuucc

SEQ ID NO: 3370 - RNA, 19 nt, artificial
  Chemically Synthesized
ugaacaccgcuuauucagc

SEQ ID NO: 3371 - RNA, 19 nt, artificial
  Chemically Synthesized
cuuauucagccacacagug

SEQ ID NO: 3372 - RNA, 19 nt, artificial
  Chemically Synthesized
aagggaauucagaagccug

SEQ ID NO: 3373 - RNA, 19 nt, artificial
  Chemically Synthesized
ugacgugcugcaggauuuc

SEQ ID NO: 3374 - RNA, 19 nt, artificial
  Chemically Synthesized
aaagcaggcaaucaccauu

SEQ ID NO: 3375 - RNA, 19 nt, artificial
  Chemically Synthesized
ucugccacuauacaagaaa

SEQ ID NO: 3376 - RNA, 19 nt, artificial
  Chemically Synthesized
gucaaaaagguaauuucug

SEQ ID NO: 3377 - RNA, 19 nt, artificial
  Chemically Synthesized
agggaauucagaagccugc

SEQ ID NO: 3378 - RNA, 19 nt, artificial
  Chemically Synthesized
ugcaaggacaggaugcuga

SEQ ID NO: 3379 - RNA, 19 nt, artificial
  Chemically Synthesized
augcaggcugacaauagug

SEQ ID NO: 3380 - RNA, 19 nt, artificial
  Chemically Synthesized
ucucugccacuauacaaga

SEQ ID NO: 3381 - RNA, 19 nt, artificial
  Chemically Synthesized
guauucacgcuccaccuuu

SEQ ID NO: 3382 - RNA, 19 nt, artificial
  Chemically Synthesized
uugggcaauuccuugugau

SEQ ID NO: 3383 - RNA, 19 nt, artificial
  Chemically Synthesized
gugauuuuaacguuuucgc

SEQ ID NO: 3384 - RNA, 19 nt, artificial
  Chemically Synthesized
aaaagauuccgugaauuug

SEQ ID NO: 3385 - RNA, 19 nt, artificial
  Chemically Synthesized
aaggacaggaugcugauau

SEQ ID NO: 3386 - RNA, 19 nt, artificial
  Chemically Synthesized
gcugauauccguguugagg

SEQ ID NO: 3387 - RNA, 19 nt, artificial
  Chemically Synthesized
acgugcugcaggauuucca

SEQ ID NO: 3388 - RNA, 19 nt, artificial
  Chemically Synthesized
caccauucaauaaacacac

SEQ ID NO: 3389 - RNA, 19 nt, artificial
  Chemically Synthesized
ucauuacacuuuugaaugc

SEQ ID NO: 3390 - RNA, 19 nt, artificial
  Chemically Synthesized
aguucacaagguuucacuc

SEQ ID NO: 3391 - RNA, 19 nt, artificial
  Chemically Synthesized
cuuagauugggcaauuccu

SEQ ID NO: 3392 - RNA, 19 nt, artificial
  Chemically Synthesized
uccuccuugugaaaugguu

SEQ ID NO: 3393 - RNA, 19 nt, artificial
  Chemically Synthesized
ccuccuugugaaaugguug

SEQ ID NO: 3394 - RNA, 19 nt, artificial
  Chemically Synthesized
aagaaaucaugaacaccgc

SEQ ID NO: 3395 - RNA, 19 nt, artificial
  Chemically Synthesized
aauucagaagccugcaagg

SEQ ID NO: 3396 - RNA, 19 nt, artificial
  Chemically Synthesized
auauccguguugagggugg

SEQ ID NO: 3397 - RNA, 19 nt, artificial
  Chemically Synthesized
aucugcagguccaagaugu

SEQ ID NO: 3398 - RNA, 19 nt, artificial
  Chemically Synthesized
cuuccaacugcagaaaggg

SEQ ID NO: 3399 - RNA, 19 nt, artificial
  Chemically Synthesized
uguuguugugcaaagaaua

SEQ ID NO: 3400 - RNA, 19 nt, artificial
  Chemically Synthesized
ucagaagccugcaaggaca

SEQ ID NO: 3401 - RNA, 19 nt, artificial
  Chemically Synthesized
augcugauauccguguuga

SEQ ID NO: 3402 - RNA, 19 nt, artificial
  Chemically Synthesized
uguauuuauuuggguucag

SEQ ID NO: 3403 - RNA, 19 nt, artificial
  Chemically Synthesized
cauucaauaaacacacuug

SEQ ID NO: 3404 - RNA, 19 nt, artificial
  Chemically Synthesized
augcagaaauagacaucuc

SEQ ID NO: 3405 - RNA, 19 nt, artificial
  Chemically Synthesized
ugccacuauacaagaaaac

SEQ ID NO: 3406 - RNA, 19 nt, artificial
  Chemically Synthesized
auuaaagaguucacaaggu

SEQ ID NO: 3407 - RNA, 19 nt, artificial
  Chemically Synthesized
aaagucugcuuagauuggg

SEQ ID NO: 3408 - RNA, 19 nt, artificial
  Chemically Synthesized
agaaagggcauuuaaaagu

SEQ ID NO: 3409 - RNA, 19 nt, artificial
  Chemically Synthesized
ugaaaaauaaguucagcac

SEQ ID NO: 3410 - RNA, 19 nt, artificial
  Chemically Synthesized
cagcacuuaaaagauuccg

SEQ ID NO: 3411 - RNA, 19 nt, artificial
  Chemically Synthesized
ugcuuugcugucauuugac

SEQ ID NO: 3412 - RNA, 19 nt, artificial
  Chemically Synthesized
auaaagcaggcaaucacca

SEQ ID NO: 3413 - RNA, 19 nt, artificial
  Chemically Synthesized
uaaagcaggcaaucaccau

SEQ ID NO: 3414 - RNA, 19 nt, artificial
  Chemically Synthesized
aaauagacaucucugccac

SEQ ID NO: 3415 - RNA, 19 nt, artificial
  Chemically Synthesized
ccacuauacaagaaaacuc

SEQ ID NO: 3416 - RNA, 19 nt, artificial
  Chemically Synthesized
aauuucugaccaaaagacu

SEQ ID NO: 3417 - RNA, 19 nt, artificial
  Chemically Synthesized
gcagucguucauguuguau

SEQ ID NO: 3418 - RNA, 19 nt, artificial
  Chemically Synthesized
guccaaguaagagaacacc

SEQ ID NO: 3419 - RNA, 19 nt, artificial
  Chemically Synthesized
caaguaagagaacacccug

SEQ ID NO: 3420 - RNA, 19 nt, artificial
  Chemically Synthesized
ugguccgacaggcuguuuu

SEQ ID NO: 3421 - RNA, 19 nt, artificial
  Chemically Synthesized
uguuguuguuguuguugug

SEQ ID NO: 3422 - RNA, 19 nt, artificial
  Chemically Synthesized
aaaaaucaaagcacugguc

SEQ ID NO: 3423 - RNA, 19 nt, artificial
  Chemically Synthesized
acugaaggcuuucaugcug

SEQ ID NO: 3424 - RNA, 19 nt, artificial
  Chemically Synthesized
agcacuuaaaagauuccgu

SEQ ID NO: 3425 - RNA, 19 nt, artificial
  Chemically Synthesized
auuccgugaauuuguuguu

SEQ ID NO: 3426 - RNA, 19 nt, artificial
  Chemically Synthesized
cgugaauuuguuguuguug

SEQ ID NO: 3427 - RNA, 19 nt, artificial
  Chemically Synthesized
gugaauuuguuguuguugu

SEQ ID NO: 3428 - RNA, 19 nt, artificial
  Chemically Synthesized
uuguuguugugcaaagaau

SEQ ID NO: 3429 - RNA, 19 nt, artificial
  Chemically Synthesized
ucuugcucaccuucuuguu

SEQ ID NO: 3430 - RNA, 19 nt, artificial
  Chemically Synthesized
ggacugaaggcuuucaugc

SEQ ID NO: 3431 - RNA, 19 nt, artificial
  Chemically Synthesized
ucugaaauaaagcaggcaa

SEQ ID NO: 3432 - RNA, 19 nt, artificial
  Chemically Synthesized
ugacugaauacuggauccu

SEQ ID NO: 3433 - RNA, 19 nt, artificial
  Chemically Synthesized
ugaauacuggauccuucug

SEQ ID NO: 3434 - RNA, 19 nt, artificial
  Chemically Synthesized
gaauacuggauccuucugg

SEQ ID NO: 3435 - RNA, 19 nt, artificial
  Chemically Synthesized
aaaaaaggcaaagucugcu

SEQ ID NO: 3436 - RNA, 19 nt, artificial
  Chemically Synthesized
caggaugcugauauccgug

SEQ ID NO: 3437 - RNA, 19 nt, artificial
  Chemically Synthesized
gugucaaaaagguaauuuc

SEQ ID NO: 3438 - RNA, 19 nt, artificial
  Chemically Synthesized
auguuguauagcaggcuca

SEQ ID NO: 3439 - RNA, 19 nt, artificial
  Chemically Synthesized
guuguauagcaggcucauc

SEQ ID NO: 3440 - RNA, 19 nt, artificial
  Chemically Synthesized
auaucacaguccaaguaag

SEQ ID NO: 3441 - RNA, 19 nt, artificial
  Chemically Synthesized
aagagaacacccugggaag

SEQ ID NO: 3442 - RNA, 19 nt, artificial
  Chemically Synthesized
uaaguucagcacuuaaaag

SEQ ID NO: 3443 - RNA, 19 nt, artificial
  Chemically Synthesized
cagaagggaauucagaagc

SEQ ID NO: 3444 - RNA, 19 nt, artificial
  Chemically Synthesized
caggauuuccaucuugcuc

SEQ ID NO: 3445 - RNA, 19 nt, artificial
  Chemically Synthesized
aaaucaaagcacugguccu

SEQ ID NO: 3446 - RNA, 19 nt, artificial
  Chemically Synthesized
guccucugaaauaaagcag

SEQ ID NO: 3447 - RNA, 19 nt, artificial
  Chemically Synthesized
auagacaucucugccacua

SEQ ID NO: 3448 - RNA, 19 nt, artificial
  Chemically Synthesized
aagguuucacucaaauaga

SEQ ID NO: 3449 - RNA, 19 nt, artificial
  Chemically Synthesized
caaaaagguaauuucugac

SEQ ID NO: 3450 - RNA, 19 nt, artificial
  Chemically Synthesized
gauccuucugguauucacg

SEQ ID NO: 3451 - RNA, 19 nt, artificial
  Chemically Synthesized
ucugcuuagauugggcaau

SEQ ID NO: 3452 - RNA, 19 nt, artificial
  Chemically Synthesized
uccuugugauuuuaacguu

SEQ ID NO: 3453 - RNA, 19 nt, artificial
  Chemically Synthesized
auggugggaauaguauaua

SEQ ID NO: 3454 - RNA, 19 nt, artificial
  Chemically Synthesized
gugggaauaguauauaaag

SEQ ID NO: 3455 - RNA, 19 nt, artificial
  Chemically Synthesized
aauaucacaguccaaguaa

SEQ ID NO: 3456 - RNA, 19 nt, artificial
  Chemically Synthesized
aguccaaguaagagaacac

SEQ ID NO: 3457 - RNA, 19 nt, artificial
  Chemically Synthesized
ugcugauauccguguugag

SEQ ID NO: 3458 - RNA, 19 nt, artificial
  Chemically Synthesized
agguccaagauguagucga

SEQ ID NO: 3459 - RNA, 19 nt, artificial
  Chemically Synthesized
ucacgggacugaaggcuuu

SEQ ID NO: 3460 - RNA, 19 nt, artificial
  Chemically Synthesized
auguagucgaugacgugcu

SEQ ID NO: 3461 - RNA, 19 nt, artificial
  Chemically Synthesized
ugaaugcagaaauagacau

SEQ ID NO: 3462 - RNA, 19 nt, artificial
  Chemically Synthesized
cacuauacaagaaaacucu

SEQ ID NO: 3463 - RNA, 19 nt, artificial
  Chemically Synthesized
ccuucugguauucacgcuc

SEQ ID NO: 3464 - RNA, 19 nt, artificial
  Chemically Synthesized
aaaggcaaagucugcuuag

SEQ ID NO: 3465 - RNA, 19 nt, artificial
  Chemically Synthesized
aaaccuuccaacugcagaa

SEQ ID NO: 3466 - RNA, 19 nt, artificial
  Chemically Synthesized
gauuccgugaauuuguugu

SEQ ID NO: 3467 - RNA, 19 nt, artificial
  Chemically Synthesized
auuaacucagaagggaauu

SEQ ID NO: 3468 - RNA, 19 nt, artificial
  Chemically Synthesized
guccaagauguagucgaug

SEQ ID NO: 3469 - RNA, 19 nt, artificial
  Chemically Synthesized
uagucgaugacgugcugca

SEQ ID NO: 3470 - RNA, 19 nt, artificial
  Chemically Synthesized
auucaguaggcuuguguca

SEQ ID NO: 3471 - RNA, 19 nt, artificial
  Chemically Synthesized
uguuguuguugugcaaaga

SEQ ID NO: 3472 - RNA, 19 nt, artificial
  Chemically Synthesized
acaccgcuuauucagccac

SEQ ID NO: 3473 - RNA, 19 nt, artificial
  Chemically Synthesized
acaggaugcugauauccgu

SEQ ID NO: 3474 - RNA, 19 nt, artificial
  Chemically Synthesized
acaauagugggaugcgagu

SEQ ID NO: 3475 - RNA, 19 nt, artificial
  Chemically Synthesized
guucacaagguuucacuca

SEQ ID NO: 3476 - RNA, 19 nt, artificial
  Chemically Synthesized
guaauuucugaccaaaaga

SEQ ID NO: 3477 - RNA, 19 nt, artificial
  Chemically Synthesized
gugacugaauacuggaucc

SEQ ID NO: 3478 - RNA, 19 nt, artificial
  Chemically Synthesized
acacccugggaagaugauc

SEQ ID NO: 3479 - RNA, 19 nt, artificial
  Chemically Synthesized
gcacuuaaaagauuccgug

SEQ ID NO: 3480 - RNA, 19 nt, artificial
  Chemically Synthesized
acaggcuguuuuuccuaac

SEQ ID NO: 3481 - RNA, 19 nt, artificial
  Chemically Synthesized
gacaggaugcugauauccg

SEQ ID NO: 3482 - RNA, 19 nt, artificial
  Chemically Synthesized
ugcucaccuucuuguucug

SEQ ID NO: 3483 - RNA, 19 nt, artificial
  Chemically Synthesized
gacaucucugccacuauac

SEQ ID NO: 3484 - RNA, 19 nt, artificial
  Chemically Synthesized
ucugaccaaaagacuucau

SEQ ID NO: 3485 - RNA, 19 nt, artificial
  Chemically Synthesized
aagucugcuuagauugggc

SEQ ID NO: 3486 - RNA, 19 nt, artificial
  Chemically Synthesized
cauguuguauagcaggcuc

SEQ ID NO: 3487 - RNA, 19 nt, artificial
  Chemically Synthesized
aggcuguuuuuccuaacgg

SEQ ID NO: 3488 - RNA, 19 nt, artificial
  Chemically Synthesized
gacaauagugggaugcgag

SEQ ID NO: 3489 - RNA, 19 nt, artificial
  Chemically Synthesized
cucaccuucuuguucuggg

SEQ ID NO: 3490 - RNA, 19 nt, artificial
  Chemically Synthesized
agcuccuugagcuuggagu

SEQ ID NO: 3491 - RNA, 19 nt, artificial
  Chemically Synthesized
acaagguuucacucaaaua

SEQ ID NO: 3492 - RNA, 19 nt, artificial
  Chemically Synthesized
guaggcuugugucaaaaag

SEQ ID NO: 3493 - RNA, 19 nt, artificial
  Chemically Synthesized
cugaccaaaagacuucauu

SEQ ID NO: 3494 - RNA, 19 nt, artificial
  Chemically Synthesized
agcagucguucauguugua

SEQ ID NO: 3495 - RNA, 19 nt, artificial
  Chemically Synthesized
ugggcaauuccuugugauu

SEQ ID NO: 3496 - RNA, 19 nt, artificial
  Chemically Synthesized
aacugcagaaagggcauuu

SEQ ID NO: 3497 - RNA, 19 nt, artificial
  Chemically Synthesized
ccaaguaagagaacacccu

SEQ ID NO: 3498 - RNA, 19 nt, artificial
  Chemically Synthesized
cgcuuauucagccacacag

SEQ ID NO: 3499 - RNA, 19 nt, artificial
  Chemically Synthesized
cugucauuugacauuaacu

SEQ ID NO: 3500 - RNA, 19 nt, artificial
  Chemically Synthesized
aacucagaagggaauucag

SEQ ID NO: 3501 - RNA, 19 nt, artificial
  Chemically Synthesized
caauagugggaugcgaguc

SEQ ID NO: 3502 - RNA, 19 nt, artificial
  Chemically Synthesized
aauagacaucucugccacu

SEQ ID NO: 3503 - RNA, 19 nt, artificial
  Chemically Synthesized
acaucucugccacuauaca

SEQ ID NO: 3504 - RNA, 19 nt, artificial
  Chemically Synthesized
acuucauuuaagugacuga

SEQ ID NO: 3505 - RNA, 19 nt, artificial
  Chemically Synthesized
cugaaggcuuucaugcuga

SEQ ID NO: 3506 - RNA, 19 nt, artificial
  Chemically Synthesized
gugcuuugcugucauuuga

SEQ ID NO: 3507 - RNA, 19 nt, artificial
  Chemically Synthesized
ucugcagguccaagaugua

SEQ ID NO: 3508 - RNA, 19 nt, artificial
  Chemically Synthesized
gaaggcuuucaugcugacc

SEQ ID NO: 3509 - RNA, 19 nt, artificial
  Chemically Synthesized
aagauguagucgaugacgu

SEQ ID NO: 3510 - RNA, 19 nt, artificial
  Chemically Synthesized
cugguccucugaaauaaag

SEQ ID NO: 3511 - RNA, 19 nt, artificial
  Chemically Synthesized
uagacaucucugccacuau

SEQ ID NO: 3512 - RNA, 19 nt, artificial
  Chemically Synthesized
ucacaagguuucacucaaa

SEQ ID NO: 3513 - RNA, 19 nt, artificial
  Chemically Synthesized
cagaaagggcauuuaaaag

SEQ ID NO: 3514 - RNA, 19 nt, artificial
  Chemically Synthesized
cacccugggaagaugauca

SEQ ID NO: 3515 - RNA, 19 nt, artificial
  Chemically Synthesized
gaucauucuuaguuuuccu

SEQ ID NO: 3516 - RNA, 19 nt, artificial
  Chemically Synthesized
guauuuauuuggguucagu

SEQ ID NO: 3517 - RNA, 19 nt, artificial
  Chemically Synthesized
agcacugguccucugaaau

SEQ ID NO: 3518 - RNA, 19 nt, artificial
  Chemically Synthesized
uccuucugguauucacgcu

SEQ ID NO: 3519 - RNA, 19 nt, artificial
  Chemically Synthesized
agauugggcaauuccuugu

SEQ ID NO: 3520 - RNA, 19 nt, artificial
  Chemically Synthesized
aacuuguccuccuugugaa

SEQ ID NO: 3521 - RNA, 19 nt, artificial
  Chemically Synthesized
cuuguccuccuugugaaau

SEQ ID NO: 3522 - RNA, 19 nt, artificial
  Chemically Synthesized
cuccuugugaaaugguuga

SEQ ID NO: 3523 - RNA, 19 nt, artificial
  Chemically Synthesized
agaaaucaugaacaccgcu

SEQ ID NO: 3524 - RNA, 19 nt, artificial
  Chemically Synthesized
acacagugcuuugcuguca

SEQ ID NO: 3525 - RNA, 19 nt, artificial
  Chemically Synthesized
caagauguagucgaugacg

SEQ ID NO: 3526 - RNA, 19 nt, artificial
  Chemically Synthesized
ccauucaauaaacacacuu

SEQ ID NO: 3527 - RNA, 19 nt, artificial
  Chemically Synthesized
agcuuggaguagcagucgu

SEQ ID NO: 3528 - RNA, 19 nt, artificial
  Chemically Synthesized
aaaagguaauuucugacca

SEQ ID NO: 3529 - RNA, 19 nt, artificial
  Chemically Synthesized
aauacuggauccuucuggu

SEQ ID NO: 3530 - RNA, 19 nt, artificial
  Chemically Synthesized
cguucauguuguauagcag

SEQ ID NO: 3531 - RNA, 19 nt, artificial
  Chemically Synthesized
gcuuagauugggcaauucc

SEQ ID NO: 3532 - RNA, 19 nt, artificial
  Chemically Synthesized
accuuccaacugcagaaag

SEQ ID NO: 3533 - RNA, 19 nt, artificial
  Chemically Synthesized
accgcuuauucagccacac

SEQ ID NO: 3534 - RNA, 19 nt, artificial
  Chemically Synthesized
caaagcacugguccucuga

SEQ ID NO: 3535 - RNA, 19 nt, artificial
  Chemically Synthesized
aaagcacugguccucugaa

SEQ ID NO: 3536 - RNA, 19 nt, artificial
  Chemically Synthesized
caggcaaucaccauucaau

SEQ ID NO: 3537 - RNA, 19 nt, artificial
  Chemically Synthesized
gcaugaauaaguacaucau

SEQ ID NO: 3538 - RNA, 19 nt, artificial
  Chemically Synthesized
cagaaauagacaucucugc

SEQ ID NO: 3539 - RNA, 19 nt, artificial
  Chemically Synthesized
caucucugccacuauacaa

SEQ ID NO: 3540 - RNA, 19 nt, artificial
  Chemically Synthesized
cuucauuuaagugacugaa

SEQ ID NO: 3541 - RNA, 19 nt, artificial
  Chemically Synthesized
cauuuaagugacugaauac

SEQ ID NO: 3542 - RNA, 19 nt, artificial
  Chemically Synthesized
uggauccuucugguauuca

SEQ ID NO: 3543 - RNA, 19 nt, artificial
  Chemically Synthesized
gaaaaaaggcaaagucugc

SEQ ID NO: 3544 - RNA, 19 nt, artificial
  Chemically Synthesized
agaacacccugggaagaug

SEQ ID NO: 3545 - RNA, 19 nt, artificial
  Chemically Synthesized
acuuaaaagauuccgugaa

SEQ ID NO: 3546 - RNA, 19 nt, artificial
  Chemically Synthesized
cucagaagggaauucagaa

SEQ ID NO: 3547 - RNA, 19 nt, artificial
  Chemically Synthesized
auagugggaugcgagucca

SEQ ID NO: 3548 - RNA, 19 nt, artificial
  Chemically Synthesized
cuugagcuuggaguagcag

SEQ ID NO: 3549 - RNA, 19 nt, artificial
  Chemically Synthesized
ugcuuagauugggcaauuc

SEQ ID NO: 3550 - RNA, 19 nt, artificial
  Chemically Synthesized
agaaaaccuuccaacugca

SEQ ID NO: 3551 - RNA, 19 nt, artificial
  Chemically Synthesized
ugcagaaagggcauuuaaa

SEQ ID NO: 3552 - RNA, 19 nt, artificial
  Chemically Synthesized
aaucaugaacaccgcuuau

SEQ ID NO: 3553 - RNA, 19 nt, artificial
  Chemically Synthesized
ugaaggcuuucaugcugac

SEQ ID NO: 3554 - RNA, 19 nt, artificial
  Chemically Synthesized
guuuuuccuaacggaccuc

SEQ ID NO: 3555 - RNA, 19 nt, artificial
  Chemically Synthesized
gguucaguuauaacauagc

SEQ ID NO: 3556 - RNA, 19 nt, artificial
  Chemically Synthesized
uacacuuuugaaugcagaa

SEQ ID NO: 3557 - RNA, 19 nt, artificial
  Chemically Synthesized
gcagaaauagacaucucug

SEQ ID NO: 3558 - RNA, 19 nt, artificial
  Chemically Synthesized
agacaucucugccacuaua

SEQ ID NO: 3559 - RNA, 19 nt, artificial
  Chemically Synthesized
uggugggaauaguauauaa

SEQ ID NO: 3560 - RNA, 19 nt, artificial
  Chemically Synthesized
ugggaagaugaucauucuu

SEQ ID NO: 3561 - RNA, 19 nt, artificial
  Chemically Synthesized
gaaaaauaaguucagcacu

SEQ ID NO: 3562 - RNA, 19 nt, artificial
  Chemically Synthesized
cuuugcugucauuugacau

SEQ ID NO: 3563 - RNA, 19 nt, artificial
  Chemically Synthesized
gaaugcagaaauagacauc

SEQ ID NO: 3564 - RNA, 19 nt, artificial
  Chemically Synthesized
ucaguaggcuugugucaaa

SEQ ID NO: 3565 - RNA, 19 nt, artificial
  Chemically Synthesized
ccaaaagacuucauuuaag

SEQ ID NO: 3566 - RNA, 19 nt, artificial
  Chemically Synthesized
aagacuucauuuaagugac

SEQ ID NO: 3567 - RNA, 19 nt, artificial
  Chemically Synthesized
gcaaagucugcuuagauug

SEQ ID NO: 3568 - RNA, 19 nt, artificial
  Chemically Synthesized
caaagucugcuuagauugg

SEQ ID NO: 3569 - RNA, 19 nt, artificial
  Chemically Synthesized
ccuugugauuuuaacguuu

SEQ ID NO: 3570 - RNA, 19 nt, artificial
  Chemically Synthesized
cauggugggaauaguauau

SEQ ID NO: 3571 - RNA, 19 nt, artificial
  Chemically Synthesized
uguuguauagcaggcucau

SEQ ID NO: 3572 - RNA, 19 nt, artificial
  Chemically Synthesized
caugaacaccgcuuauuca

SEQ ID NO: 3573 - RNA, 19 nt, artificial
  Chemically Synthesized
gaaauagacaucucugcca

SEQ ID NO: 3574 - RNA, 19 nt, artificial
  Chemically Synthesized
cauucaguaggcuuguguc

SEQ ID NO: 3575 - RNA, 19 nt, artificial
  Chemically Synthesized
gacuucauuuaagugacug

SEQ ID NO: 3576 - RNA, 19 nt, artificial
  Chemically Synthesized
aaaaaggcaaagucugcuu

SEQ ID NO: 3577 - RNA, 19 nt, artificial
  Chemically Synthesized
aacaccgcuuauucagcca

SEQ ID NO: 3578 - RNA, 19 nt, artificial
  Chemically Synthesized
acucagaagggaauucaga

SEQ ID NO: 3579 - RNA, 19 nt, artificial
  Chemically Synthesized
auucagaagccugcaagga

SEQ ID NO: 3580 - RNA, 19 nt, artificial
  Chemically Synthesized
cagguccaagauguagucg

SEQ ID NO: 3581 - RNA, 19 nt, artificial
  Chemically Synthesized
cugcaggauuuccaucuug

SEQ ID NO: 3582 - RNA, 19 nt, artificial
  Chemically Synthesized
gggacugaaggcuuucaug

SEQ ID NO: 3583 - RNA, 19 nt, artificial
  Chemically Synthesized
ggguucaguuauaacauag

SEQ ID NO: 3584 - RNA, 19 nt, artificial
  Chemically Synthesized
cuuuugaaugcagaaauag

SEQ ID NO: 3585 - RNA, 19 nt, artificial
  Chemically Synthesized
auugggcaauuccuuguga

SEQ ID NO: 3586 - RNA, 19 nt, artificial
  Chemically Synthesized
gaaagggcauuuaaaaguc

SEQ ID NO: 3587 - RNA, 19 nt, artificial
  Chemically Synthesized
uccuugugaaaugguugaa

SEQ ID NO: 3588 - RNA, 19 nt, artificial
  Chemically Synthesized
agauuccgugaauuuguug

SEQ ID NO: 3589 - RNA, 19 nt, artificial
  Chemically Synthesized
caggcuguuuuuccuaacg

SEQ ID NO: 3590 - RNA, 19 nt, artificial
  Chemically Synthesized
agccacacagugcuuugcu

SEQ ID NO: 3591 - RNA, 19 nt, artificial
  Chemically Synthesized
gcuguuuuuccuaacggac

SEQ ID NO: 3592 - RNA, 19 nt, artificial
  Chemically Synthesized
cugcagguccaagauguag

SEQ ID NO: 3593 - RNA, 19 nt, artificial
  Chemically Synthesized
uggguucaguuauaacaua

SEQ ID NO: 3594 - RNA, 19 nt, artificial
  Chemically Synthesized
aagcacugguccucugaaa

SEQ ID NO: 3595 - RNA, 19 nt, artificial
  Chemically Synthesized
guacaucauuacacuuuug

SEQ ID NO: 3596 - RNA, 19 nt, artificial
  Chemically Synthesized
cucuaauuaaagaguucac

SEQ ID NO: 3597 - RNA, 19 nt, artificial
  Chemically Synthesized
agaguucacaagguuucac

SEQ ID NO: 3598 - RNA, 19 nt, artificial
  Chemically Synthesized
aagguaauuucugaccaaa

SEQ ID NO: 3599 - RNA, 19 nt, artificial
  Chemically Synthesized
ccaccuuugaaaaaaggca

SEQ ID NO: 3600 - RNA, 19 nt, artificial
  Chemically Synthesized
aagggcauuuaaaagucuu

SEQ ID NO: 3601 - RNA, 19 nt, artificial
  Chemically Synthesized
cgaauaucacaguccaagu

SEQ ID NO: 3602 - RNA, 19 nt, artificial
  Chemically Synthesized
cagugcuuugcugucauuu

SEQ ID NO: 3603 - RNA, 19 nt, artificial
  Chemically Synthesized
acugguccucugaaauaaa

SEQ ID NO: 3604 - RNA, 19 nt, artificial
  Chemically Synthesized
guuuagcaugaauaaguac

SEQ ID NO: 3605 - RNA, 19 nt, artificial
  Chemically Synthesized
gcuuggaguagcagucguu

SEQ ID NO: 3606 - RNA, 19 nt, artificial
  Chemically Synthesized
cuugugaaaugguugaaaa

SEQ ID NO: 3607 - RNA, 19 nt, artificial
  Chemically Synthesized
aguucagcacuuaaaagau

SEQ ID NO: 3608 - RNA, 19 nt, artificial
  Chemically Synthesized
gucauuugacauuaacuca

SEQ ID NO: 3609 - RNA, 19 nt, artificial
  Chemically Synthesized
acauuaacucagaagggaa

SEQ ID NO: 3610 - RNA, 19 nt, artificial
  Chemically Synthesized
aggaugcugauauccgugu

SEQ ID NO: 3611 - RNA, 19 nt, artificial
  Chemically Synthesized
cugacaauagugggaugcg

SEQ ID NO: 3612 - RNA, 19 nt, artificial
  Chemically Synthesized
gugcugcaggauuuccauc

SEQ ID NO: 3613 - RNA, 19 nt, artificial
  Chemically Synthesized
gcucaccuucuuguucugg

SEQ ID NO: 3614 - RNA, 19 nt, artificial
  Chemically Synthesized
aggcaaucaccauucaaua

SEQ ID NO: 3615 - RNA, 19 nt, artificial
  Chemically Synthesized
cacuuuugaaugcagaaau

SEQ ID NO: 3616 - RNA, 19 nt, artificial
  Chemically Synthesized
acuggauccuucugguauu

SEQ ID NO: 3617 - RNA, 19 nt, artificial
  Chemically Synthesized
agucugcuuagauugggca

SEQ ID NO: 3618 - RNA, 19 nt, artificial
  Chemically Synthesized
gaacaccgcuuauucagcc

SEQ ID NO: 3619 - RNA, 19 nt, artificial
  Chemically Synthesized
ccaagauguagucgaugac

SEQ ID NO: 3620 - RNA, 19 nt, artificial
  Chemically Synthesized
agauguagucgaugacgug

SEQ ID NO: 3621 - RNA, 19 nt, artificial
  Chemically Synthesized
gaugacgugcugcaggauu

SEQ ID NO: 3622 - RNA, 19 nt, artificial
  Chemically Synthesized
gaguucacaagguuucacu

SEQ ID NO: 3623 - RNA, 19 nt, artificial
  Chemically Synthesized
aaaaggcaaagucugcuua

SEQ ID NO: 3624 - RNA, 19 nt, artificial
  Chemically Synthesized
aacgaauaucacaguccaa

SEQ ID NO: 3625 - RNA, 19 nt, artificial
  Chemically Synthesized
guugaaaaauaaguucagc

SEQ ID NO: 3626 - RNA, 19 nt, artificial
  Chemically Synthesized
uauccguguugaggguggu

SEQ ID NO: 3627 - RNA, 19 nt, artificial
  Chemically Synthesized
aagaguucacaagguuuca

SEQ ID NO: 3628 - RNA, 19 nt, artificial
  Chemically Synthesized
gacugaauacuggauccuu

SEQ ID NO: 3629 - RNA, 19 nt, artificial
  Chemically Synthesized
gggcaauuccuugugauuu

SEQ ID NO: 3630 - RNA, 19 nt, artificial
  Chemically Synthesized
guugugcaaagaauaaaag

SEQ ID NO: 3631 - RNA, 19 nt, artificial
  Chemically Synthesized
auucagccacacagugcuu

SEQ ID NO: 3632 - RNA, 19 nt, artificial
  Chemically Synthesized
aagccugcaaggacaggau

SEQ ID NO: 3633 - RNA, 19 nt, artificial
  Chemically Synthesized
gaugcugauauccguguug

SEQ ID NO: 3634 - RNA, 19 nt, artificial
  Chemically Synthesized
uguagucgaugacgugcug

SEQ ID NO: 3635 - RNA, 19 nt, artificial
  Chemically Synthesized
acgggacugaaggcuuuca

SEQ ID NO: 3636 - RNA, 19 nt, artificial
  Chemically Synthesized
gaaauaaagcaggcaauca

SEQ ID NO: 3637 - RNA, 19 nt, artificial
  Chemically Synthesized
cauuacacuuuugaaugca

SEQ ID NO: 3638 - RNA, 19 nt, artificial
  Chemically Synthesized
auacuggauccuucuggua

SEQ ID NO: 3639 - RNA, 19 nt, artificial
  Chemically Synthesized
acugcagaaagggcauuua

SEQ ID NO: 3640 - RNA, 19 nt, artificial
  Chemically Synthesized
ggaagaugaucauucuuag

SEQ ID NO: 3641 - RNA, 19 nt, artificial
  Chemically Synthesized
gcugacaauagugggaugc

SEQ ID NO: 3642 - RNA, 19 nt, artificial
  Chemically Synthesized
ccaucuugcucaccuucuu

SEQ ID NO: 3643 - RNA, 19 nt, artificial
  Chemically Synthesized
cacaagguuucacucaaau

SEQ ID NO: 3644 - RNA, 19 nt, artificial
  Chemically Synthesized
gcauucaguaggcuugugu

SEQ ID NO: 3645 - RNA, 19 nt, artificial
  Chemically Synthesized
gaaaaccuuccaacugcag

SEQ ID NO: 3646 - RNA, 19 nt, artificial
  Chemically Synthesized
ccacacagugcuuugcugu

SEQ ID NO: 3647 - RNA, 19 nt, artificial
  Chemically Synthesized
cacacagugcuuugcuguc

SEQ ID NO: 3648 - RNA, 19 nt, artificial
  Chemically Synthesized
agaagggaauucagaagcc

SEQ ID NO: 3649 - RNA, 19 nt, artificial
  Chemically Synthesized
gugaugcaggcugacaaua

SEQ ID NO: 3650 - RNA, 19 nt, artificial
  Chemically Synthesized
aggcugacaauagugggau

SEQ ID NO: 3651 - RNA, 19 nt, artificial
  Chemically Synthesized
gcaaucaccauucaauaaa

SEQ ID NO: 3652 - RNA, 19 nt, artificial
  Chemically Synthesized
cacagcauucaguaggcuu

SEQ ID NO: 3653 - RNA, 19 nt, artificial
  Chemically Synthesized
agguaauuucugaccaaaa

SEQ ID NO: 3654 - RNA, 19 nt, artificial
  Chemically Synthesized
cuccaccuuugaaaaaagg

SEQ ID NO: 3655 - RNA, 19 nt, artificial
  Chemically Synthesized
cuuugaaaaaaggcaaagu

SEQ ID NO: 3656 - RNA, 19 nt, artificial
  Chemically Synthesized
guaagagaacacccuggga

SEQ ID NO: 3657 - RNA, 19 nt, artificial
  Chemically Synthesized
gaacacccugggaagauga

SEQ ID NO: 3658 - RNA, 19 nt, artificial
  Chemically Synthesized
guccgacaggcuguuuuuc

SEQ ID NO: 3659 - RNA, 19 nt, artificial
  Chemically Synthesized
cuuaaaagauuccgugaau

SEQ ID NO: 3660 - RNA, 19 nt, artificial
  Chemically Synthesized
caccgcuuauucagccaca

SEQ ID NO: 3661 - RNA, 19 nt, artificial
  Chemically Synthesized
gcugucauuugacauuaac

SEQ ID NO: 3662 - RNA, 19 nt, artificial
  Chemically Synthesized
aggacaggaugcugauauc

SEQ ID NO: 3663 - RNA, 19 nt, artificial
  Chemically Synthesized
gccacuauacaagaaaacu

SEQ ID NO: 3664 - RNA, 19 nt, artificial
  Chemically Synthesized
agggcauuuaaaagucuuu

SEQ ID NO: 3665 - RNA, 19 nt, artificial
  Chemically Synthesized
gggaagaugaucauucuua

SEQ ID NO: 3666 - RNA, 19 nt, artificial
  Chemically Synthesized
guccuccuugugaaauggu

SEQ ID NO: 3667 - RNA, 19 nt, artificial
  Chemically Synthesized
ccgcuuauucagccacaca

SEQ ID NO: 3668 - RNA, 19 nt, artificial
  Chemically Synthesized
gauuuccaucuugcucacc

SEQ ID NO: 3669 - RNA, 19 nt, artificial
  Chemically Synthesized
caaucaccauucaauaaac

SEQ ID NO: 3670 - RNA, 19 nt, artificial
  Chemically Synthesized
caguccaaguaagagaaca

SEQ ID NO: 3671 - RNA, 19 nt, artificial
  Chemically Synthesized
ggacaggaugcugauaucc

SEQ ID NO: 3672 - RNA, 19 nt, artificial
  Chemically Synthesized
gaugcaggcugacaauagu

SEQ ID NO: 3673 - RNA, 19 nt, artificial
  Chemically Synthesized
guucaguuauaacauagca

SEQ ID NO: 3674 - RNA, 19 nt, artificial
  Chemically Synthesized
accauucaauaaacacacu

SEQ ID NO: 3675 - RNA, 19 nt, artificial
  Chemically Synthesized
caccuuugaaaaaaggcaa

SEQ ID NO: 3676 - RNA, 19 nt, artificial
  Chemically Synthesized
ccuuccaacugcagaaagg

SEQ ID NO: 3677 - RNA, 19 nt, artificial
  Chemically Synthesized
acuuguccuccuugugaaa

SEQ ID NO: 3678 - RNA, 19 nt, artificial
  Chemically Synthesized
ccuugugaaaugguugaaa

SEQ ID NO: 3679 - RNA, 19 nt, artificial
  Chemically Synthesized
ccgacaggcuguuuuuccu

SEQ ID NO: 3680 - RNA, 19 nt, artificial
  Chemically Synthesized
gcagguccaagauguaguc

SEQ ID NO: 3681 - RNA, 19 nt, artificial
  Chemically Synthesized
gguccucugaaauaaagca

SEQ ID NO: 3682 - RNA, 19 nt, artificial
  Chemically Synthesized
gguuucacucaaauagaua

SEQ ID NO: 3683 - RNA, 19 nt, artificial
  Chemically Synthesized
aggcuugugucaaaaaggu

SEQ ID NO: 3684 - RNA, 19 nt, artificial
  Chemically Synthesized
gcuugugucaaaaagguaa

SEQ ID NO: 3685 - RNA, 19 nt, artificial
  Chemically Synthesized
gaccaaaagacuucauuua

SEQ ID NO: 3686 - RNA, 19 nt, artificial
  Chemically Synthesized
aggcaaagucugcuuagau

SEQ ID NO: 3687 - RNA, 19 nt, artificial
  Chemically Synthesized
acaguccaaguaagagaac

SEQ ID NO: 3688 - RNA, 19 nt, artificial
  Chemically Synthesized
aagauuccgugaauuuguu

SEQ ID NO: 3689 - RNA, 19 nt, artificial
  Chemically Synthesized
cacugguccucugaaauaa

SEQ ID NO: 3690 - RNA, 19 nt, artificial
  Chemically Synthesized
acacuuuugaaugcagaaa

SEQ ID NO: 3691 - RNA, 19 nt, artificial
  Chemically Synthesized
aaagggcauuuaaaagucu

SEQ ID NO: 3692 - RNA, 19 nt, artificial
  Chemically Synthesized
cacaguccaaguaagagaa

SEQ ID NO: 3693 - RNA, 19 nt, artificial
  Chemically Synthesized
agagaacacccugggaaga

SEQ ID NO: 3694 - RNA, 19 nt, artificial
  Chemically Synthesized
cugggaagaugaucauucu

SEQ ID NO: 3695 - RNA, 19 nt, artificial
  Chemically Synthesized
guucagcacuuaaaagauu

SEQ ID NO: 3696 - RNA, 19 nt, artificial
  Chemically Synthesized
cgugcugcaggauuuccau

SEQ ID NO: 3697 - RNA, 19 nt, artificial
  Chemically Synthesized
aguaggcuugugucaaaaa

SEQ ID NO: 3698 - RNA, 19 nt, artificial
  Chemically Synthesized
aaagguaauuucugaccaa

SEQ ID NO: 3699 - RNA, 19 nt, artificial
  Chemically Synthesized
cuggauccuucugguauuc

SEQ ID NO: 3700 - RNA, 19 nt, artificial
  Chemically Synthesized
uguuguuguuguugugcaa

SEQ ID NO: 3701 - RNA, 19 nt, artificial
  Chemically Synthesized
guuguuguugugcaaagaa

SEQ ID NO: 3702 - RNA, 19 nt, artificial
  Chemically Synthesized
ugcugucauuugacauuaa

SEQ ID NO: 3703 - RNA, 19 nt, artificial
  Chemically Synthesized
gauauccguguugagggug

SEQ ID NO: 3704 - RNA, 19 nt, artificial
  Chemically Synthesized
cuccuugagcuuggaguag

SEQ ID NO: 3705 - RNA, 19 nt, artificial
  Chemically Synthesized
aaccuuccaacugcagaaa

SEQ ID NO: 3706 - RNA, 19 nt, artificial
  Chemically Synthesized
aggguuaaguuuacaacua

SEQ ID NO: 3707 - RNA, 19 nt, artificial
  Chemically Synthesized
gacuucuuuugguuuucuu

SEQ ID NO: 3708 - RNA, 19 nt, artificial
  Chemically Synthesized
gggccauuuugaauaaaga

SEQ ID NO: 3709 - RNA, 19 nt, artificial
  Chemically Synthesized
ggaggaagccuguuugcaa

SEQ ID NO: 3710 - RNA, 19 nt, artificial
  Chemically Synthesized
ggacuucuuuugguuuucu

SEQ ID NO: 3711 - RNA, 19 nt, artificial
  Chemically Synthesized
agcaaauucuggaaguuaa

SEQ ID NO: 3712 - RNA, 19 nt, artificial
  Chemically Synthesized
gcaaauucuggaaguuaau

SEQ ID NO: 3713 - RNA, 19 nt, artificial
  Chemically Synthesized
cccacuugacuucaccaaa

SEQ ID NO: 3714 - RNA, 19 nt, artificial
  Chemically Synthesized
cuuuugguuuucuuucucu

SEQ ID NO: 3715 - RNA, 19 nt, artificial
  Chemically Synthesized
gcuugcuggacgacaugaa

SEQ ID NO: 3716 - RNA, 19 nt, artificial
  Chemically Synthesized
aagccuguuugcaauuuaa

SEQ ID NO: 3717 - RNA, 19 nt, artificial
  Chemically Synthesized
ggaaguuaaugguuuugag

SEQ ID NO: 3718 - RNA, 19 nt, artificial
  Chemically Synthesized
ggaaaaagcaaauucugga

SEQ ID NO: 3719 - RNA, 19 nt, artificial
  Chemically Synthesized
gaggaagccuguuugcaau

SEQ ID NO: 3720 - RNA, 19 nt, artificial
  Chemically Synthesized
cccugauuuaugaacucua

SEQ ID NO: 3721 - RNA, 19 nt, artificial
  Chemically Synthesized
aggagcgaaggacugugaa

SEQ ID NO: 3722 - RNA, 19 nt, artificial
  Chemically Synthesized
cggaacuugucaucuccaa

SEQ ID NO: 3723 - RNA, 19 nt, artificial
  Chemically Synthesized
cgggacuucuuuugguuuu

SEQ ID NO: 3724 - RNA, 19 nt, artificial
  Chemically Synthesized
gcgggccauuuugaauaaa

SEQ ID NO: 3725 - RNA, 19 nt, artificial
  Chemically Synthesized
cagggaagcucaaagaucu

SEQ ID NO: 3726 - RNA, 19 nt, artificial
  Chemically Synthesized
gaaaaagcaaauucuggaa

SEQ ID NO: 3727 - RNA, 19 nt, artificial
  Chemically Synthesized
ugagcuugcuggacgacau

SEQ ID NO: 3728 - RNA, 19 nt, artificial
  Chemically Synthesized
ggcgggccauuuugaauaa

SEQ ID NO: 3729 - RNA, 19 nt, artificial
  Chemically Synthesized
aauuuaagcgggcugugaa

SEQ ID NO: 3730 - RNA, 19 nt, artificial
  Chemically Synthesized
gcgggacuucuuuugguuu

SEQ ID NO: 3731 - RNA, 19 nt, artificial
  Chemically Synthesized
aggugacuuucuguaacaa

SEQ ID NO: 3732 - RNA, 19 nt, artificial
  Chemically Synthesized
gaagccuguuugcaauuua

SEQ ID NO: 3733 - RNA, 19 nt, artificial
  Chemically Synthesized
ggugacuuucuguaacaau

SEQ ID NO: 3734 - RNA, 19 nt, artificial
  Chemically Synthesized
ugaacuuguggccugaaga

SEQ ID NO: 3735 - RNA, 19 nt, artificial
  Chemically Synthesized
cugugaacuuguggccuga

SEQ ID NO: 3736 - RNA, 19 nt, artificial
  Chemically Synthesized
ccaggaaaaagcaaauucu

SEQ ID NO: 3737 - RNA, 19 nt, artificial
  Chemically Synthesized
cuuccaggcaggcucuaua

SEQ ID NO: 3738 - RNA, 19 nt, artificial
  Chemically Synthesized
cuucuuuugguuuucuuuc

SEQ ID NO: 3739 - RNA, 19 nt, artificial
  Chemically Synthesized
aguuaaugguuuugaguga

SEQ ID NO: 3740 - RNA, 19 nt, artificial
  Chemically Synthesized
agcgggacuucuuuugguu

SEQ ID NO: 3741 - RNA, 19 nt, artificial
  Chemically Synthesized
gcugccaggaaaaagcaaa

SEQ ID NO: 3742 - RNA, 19 nt, artificial
  Chemically Synthesized
ccaaaucccuuccuggaga

SEQ ID NO: 3743 - RNA, 19 nt, artificial
  Chemically Synthesized
gccagguggaaauccuaca

SEQ ID NO: 3744 - RNA, 19 nt, artificial
  Chemically Synthesized
caauuuaagcgggcuguga

SEQ ID NO: 3745 - RNA, 19 nt, artificial
  Chemically Synthesized
gaggcgggccauuuugaau

SEQ ID NO: 3746 - RNA, 19 nt, artificial
  Chemically Synthesized
cuguaacaaugcgauguau

SEQ ID NO: 3747 - RNA, 19 nt, artificial
  Chemically Synthesized
cuguugcccugauuuauga

SEQ ID NO: 3748 - RNA, 19 nt, artificial
  Chemically Synthesized
agcuuagccagguggaaau

SEQ ID NO: 3749 - RNA, 19 nt, artificial
  Chemically Synthesized
gcgcuuccucauucuuuga

SEQ ID NO: 3750 - RNA, 19 nt, artificial
  Chemically Synthesized
cgauuuuuaaacacuugug

SEQ ID NO: 3751 - RNA, 19 nt, artificial
  Chemically Synthesized
guucuguugcccugauuua

SEQ ID NO: 3752 - RNA, 19 nt, artificial
  Chemically Synthesized
gguucuguugcccugauuu

SEQ ID NO: 3753 - RNA, 19 nt, artificial
  Chemically Synthesized
ucuuuugguuuucuuucuc

SEQ ID NO: 3754 - RNA, 19 nt, artificial
  Chemically Synthesized
cuuuuuuacaggaagguga

SEQ ID NO: 3755 - RNA, 19 nt, artificial
  Chemically Synthesized
gcccacuugacuucaccaa

SEQ ID NO: 3756 - RNA, 19 nt, artificial
  Chemically Synthesized
acgacaugaaccacugcua

SEQ ID NO: 3757 - RNA, 19 nt, artificial
  Chemically Synthesized
ccaggcaggcucuauaagu

SEQ ID NO: 3758 - RNA, 19 nt, artificial
  Chemically Synthesized
cgggccauuuugaauaaag

SEQ ID NO: 3759 - RNA, 19 nt, artificial
  Chemically Synthesized
gguaucagcgcuuccucau

SEQ ID NO: 3760 - RNA, 19 nt, artificial
  Chemically Synthesized
aggcaggcucuauaaguga

SEQ ID NO: 3761 - RNA, 19 nt, artificial
  Chemically Synthesized
cuuggagaaagguucuguu

SEQ ID NO: 3762 - RNA, 19 nt, artificial
  Chemically Synthesized
cgacaugaaccacugcuac

SEQ ID NO: 3763 - RNA, 19 nt, artificial
  Chemically Synthesized
ucuggaaguuaaugguuuu

SEQ ID NO: 3764 - RNA, 19 nt, artificial
  Chemically Synthesized
ccuggagacuaaaccuggu

SEQ ID NO: 3765 - RNA, 19 nt, artificial
  Chemically Synthesized
ggccauuuugaauaaagag

SEQ ID NO: 3766 - RNA, 19 nt, artificial
  Chemically Synthesized
cuuucuguaacaaugcgau

SEQ ID NO: 3767 - RNA, 19 nt, artificial
  Chemically Synthesized
gaaguuaaugguuuugagu

SEQ ID NO: 3768 - RNA, 19 nt, artificial
  Chemically Synthesized
gcucuccaaacuaugccaa

SEQ ID NO: 3769 - RNA, 19 nt, artificial
  Chemically Synthesized
ugucaucuccaacgacaaa

SEQ ID NO: 3770 - RNA, 19 nt, artificial
  Chemically Synthesized
uagccagguggaaauccua

SEQ ID NO: 3771 - RNA, 19 nt, artificial
  Chemically Synthesized
cugccaggaaaaagcaaau

SEQ ID NO: 3772 - RNA, 19 nt, artificial
  Chemically Synthesized
cacuguagcgggacuucuu

SEQ ID NO: 3773 - RNA, 19 nt, artificial
  Chemically Synthesized
ggcagggaagcucaaagau

SEQ ID NO: 3774 - RNA, 19 nt, artificial
  Chemically Synthesized
ugugaacuuguggccugaa

SEQ ID NO: 3775 - RNA, 19 nt, artificial
  Chemically Synthesized
uguccugacaccuccagaa

SEQ ID NO: 3776 - RNA, 19 nt, artificial
  Chemically Synthesized
uugucaucuccaacgacaa

SEQ ID NO: 3777 - RNA, 19 nt, artificial
  Chemically Synthesized
caggaaaaagcaaauucug

SEQ ID NO: 3778 - RNA, 19 nt, artificial
  Chemically Synthesized
gggacuucuuuugguuuuc

SEQ ID NO: 3779 - RNA, 19 nt, artificial
  Chemically Synthesized
aggaaggugacuuucugua

SEQ ID NO: 3780 - RNA, 19 nt, artificial
  Chemically Synthesized
ggcugcucuccaaacuaug

SEQ ID NO: 3781 - RNA, 19 nt, artificial
  Chemically Synthesized
cuugcuggacgacaugaac

SEQ ID NO: 3782 - RNA, 19 nt, artificial
  Chemically Synthesized
ugcugccaggaaaaagcaa

SEQ ID NO: 3783 - RNA, 19 nt, artificial
  Chemically Synthesized
guucuaaggucucuucaga

SEQ ID NO: 3784 - RNA, 19 nt, artificial
  Chemically Synthesized
cagcgcuuccucauucuuu

SEQ ID NO: 3785 - RNA, 19 nt, artificial
  Chemically Synthesized
gacuaaaccuggugcucag

SEQ ID NO: 3786 - RNA, 19 nt, artificial
  Chemically Synthesized
ggagcuuuugccacugacu

SEQ ID NO: 3787 - RNA, 19 nt, artificial
  Chemically Synthesized
uuccaggcaggcucuauaa

SEQ ID NO: 3788 - RNA, 19 nt, artificial
  Chemically Synthesized
uguaccuuuuuuacaggaa

SEQ ID NO: 3789 - RNA, 19 nt, artificial
  Chemically Synthesized
guggcugcucuccaaacua

SEQ ID NO: 3790 - RNA, 19 nt, artificial
  Chemically Synthesized
caccaaaucccuuccugga

SEQ ID NO: 3791 - RNA, 19 nt, artificial
  Chemically Synthesized
ccggaacuugucaucucca

SEQ ID NO: 3792 - RNA, 19 nt, artificial
  Chemically Synthesized
gcgucaucgacuacauucu

SEQ ID NO: 3793 - RNA, 19 nt, artificial
  Chemically Synthesized
agcgcgucaucgacuacau

SEQ ID NO: 3794 - RNA, 19 nt, artificial
  Chemically Synthesized
ucagcuuagccagguggaa

SEQ ID NO: 3795 - RNA, 19 nt, artificial
  Chemically Synthesized
caggcaggcucuauaagug

SEQ ID NO: 3796 - RNA, 19 nt, artificial
  Chemically Synthesized
gucuucuggucuccuugga

SEQ ID NO: 3797 - RNA, 19 nt, artificial
  Chemically Synthesized
ccaaguucuaaggucucuu

SEQ ID NO: 3798 - RNA, 19 nt, artificial
  Chemically Synthesized
agcgaaggacugugaacuu

SEQ ID NO: 3799 - RNA, 19 nt, artificial
  Chemically Synthesized
aucccuuccuggagacuaa

SEQ ID NO: 3800 - RNA, 19 nt, artificial
  Chemically Synthesized
cuguagcgggacuucuuuu

SEQ ID NO: 3801 - RNA, 19 nt, artificial
  Chemically Synthesized
acuguagcgggacuucuuu

SEQ ID NO: 3802 - RNA, 19 nt, artificial
  Chemically Synthesized
gaguauauagguuuuguac

SEQ ID NO: 3803 - RNA, 19 nt, artificial
  Chemically Synthesized
cucacuccggaacuuguca

SEQ ID NO: 3804 - RNA, 19 nt, artificial
  Chemically Synthesized
acuacauucucgaccugca

SEQ ID NO: 3805 - RNA, 19 nt, artificial
  Chemically Synthesized
ggagacuaaaccuggugcu

SEQ ID NO: 3806 - RNA, 19 nt, artificial
  Chemically Synthesized
agcgcuuccucauucuuug

SEQ ID NO: 3807 - RNA, 19 nt, artificial
  Chemically Synthesized
ucuggucuccuuggagaaa

SEQ ID NO: 3808 - RNA, 19 nt, artificial
  Chemically Synthesized
caacgacaaaaggagcuuu

SEQ ID NO: 3809 - RNA, 19 nt, artificial
  Chemically Synthesized
ggcaggcucuauaagugac

SEQ ID NO: 3810 - RNA, 19 nt, artificial
  Chemically Synthesized
gcuuccucauucuuugaau

SEQ ID NO: 3811 - RNA, 19 nt, artificial
  Chemically Synthesized
guaccuuuuuuacaggaag

SEQ ID NO: 3812 - RNA, 19 nt, artificial
  Chemically Synthesized
uguugcccugauuuaugaa

SEQ ID NO: 3813 - RNA, 19 nt, artificial
  Chemically Synthesized
cuucuggucuccuuggaga

SEQ ID NO: 3814 - RNA, 19 nt, artificial
  Chemically Synthesized
aagcaaauucuggaaguua

SEQ ID NO: 3815 - RNA, 19 nt, artificial
  Chemically Synthesized
gaaauccuacagcgcguca

SEQ ID NO: 3816 - RNA, 19 nt, artificial
  Chemically Synthesized
gacaugaaccacugcuacu

SEQ ID NO: 3817 - RNA, 19 nt, artificial
  Chemically Synthesized
gguuuucuuucucuuuggg

SEQ ID NO: 3818 - RNA, 19 nt, artificial
  Chemically Synthesized
caggaaggugacuuucugu

SEQ ID NO: 3819 - RNA, 19 nt, artificial
  Chemically Synthesized
guuaaugguuuugagugau

SEQ ID NO: 3820 - RNA, 19 nt, artificial
  Chemically Synthesized
gugaacuuguggccugaag

SEQ ID NO: 3821 - RNA, 19 nt, artificial
  Chemically Synthesized
aggcgggccauuuugaaua

SEQ ID NO: 3822 - RNA, 19 nt, artificial
  Chemically Synthesized
gugcugccaggaaaaagca

SEQ ID NO: 3823 - RNA, 19 nt, artificial
  Chemically Synthesized
aaguucuaaggucucuuca

SEQ ID NO: 3824 - RNA, 19 nt, artificial
  Chemically Synthesized
cgacuacauucucgaccug

SEQ ID NO: 3825 - RNA, 19 nt, artificial
  Chemically Synthesized
gagcgaaggacugugaacu

SEQ ID NO: 3826 - RNA, 19 nt, artificial
  Chemically Synthesized
cuugucaucuccaacgaca

SEQ ID NO: 3827 - RNA, 19 nt, artificial
  Chemically Synthesized
gaauaaagaggcgugccuu

SEQ ID NO: 3828 - RNA, 19 nt, artificial
  Chemically Synthesized
agggaagcucaaagaucug

SEQ ID NO: 3829 - RNA, 19 nt, artificial
  Chemically Synthesized
ggaacuugucaucuccaac

SEQ ID NO: 3830 - RNA, 19 nt, artificial
  Chemically Synthesized
aaaagcaaauucuggaagu

SEQ ID NO: 3831 - RNA, 19 nt, artificial
  Chemically Synthesized
ugguuuucuuucucuuugg

SEQ ID NO: 3832 - RNA, 19 nt, artificial
  Chemically Synthesized
aacuugucaucuccaacga

SEQ ID NO: 3833 - RNA, 19 nt, artificial
  Chemically Synthesized
agcucacuccggaacuugu

SEQ ID NO: 3834 - RNA, 19 nt, artificial
  Chemically Synthesized
cauucucgaccugcaggua

SEQ ID NO: 3835 - RNA, 19 nt, artificial
  Chemically Synthesized
uagcgggacuucuuuuggu

SEQ ID NO: 3836 - RNA, 19 nt, artificial
  Chemically Synthesized
uggucuccuuggagaaagg

SEQ ID NO: 3837 - RNA, 19 nt, artificial
  Chemically Synthesized
uucuggucuccuuggagaa

SEQ ID NO: 3838 - RNA, 19 nt, artificial
  Chemically Synthesized
aguggcugcucuccaaacu

SEQ ID NO: 3839 - RNA, 19 nt, artificial
  Chemically Synthesized
aauucuggaaguuaauggu

SEQ ID NO: 3840 - RNA, 19 nt, artificial
  Chemically Synthesized
acaaaaggagcuuuugcca

SEQ ID NO: 3841 - RNA, 19 nt, artificial
  Chemically Synthesized
ugcuggacgacaugaacca

SEQ ID NO: 3842 - RNA, 19 nt, artificial
  Chemically Synthesized
uaaagaggcgugccuucca

SEQ ID NO: 3843 - RNA, 19 nt, artificial
  Chemically Synthesized
auuuaagcgggcugugaac

SEQ ID NO: 3844 - RNA, 19 nt, artificial
  Chemically Synthesized
cgcuuccucauucuuugaa

SEQ ID NO: 3845 - RNA, 19 nt, artificial
  Chemically Synthesized
ggaagcucaaagaucuggg

SEQ ID NO: 3846 - RNA, 19 nt, artificial
  Chemically Synthesized
guaucagcgcuuccucauu

SEQ ID NO: 3847 - RNA, 19 nt, artificial
  Chemically Synthesized
acacuuguguauaugauga

SEQ ID NO: 3848 - RNA, 19 nt, artificial
  Chemically Synthesized
acuuucuguaacaaugcga

SEQ ID NO: 3849 - RNA, 19 nt, artificial
  Chemically Synthesized
ccaacgacaaaaggagcuu

SEQ ID NO: 3850 - RNA, 19 nt, artificial
  Chemically Synthesized
ucaucgacuacauucucga

SEQ ID NO: 3851 - RNA, 19 nt, artificial
  Chemically Synthesized
uggaaauccuacagcgcgu

SEQ ID NO: 3852 - RNA, 19 nt, artificial
  Chemically Synthesized
agcuugcuggacgacauga

SEQ ID NO: 3853 - RNA, 19 nt, artificial
  Chemically Synthesized
cauuuugaauaaagaggcg

SEQ ID NO: 3854 - RNA, 19 nt, artificial
  Chemically Synthesized
aaagcaaauucuggaaguu

SEQ ID NO: 3855 - RNA, 19 nt, artificial
  Chemically Synthesized
uuuacaggaaggugacuuu

SEQ ID NO: 3856 - RNA, 19 nt, artificial
  Chemically Synthesized
gguuuuguaccuuuuuuac

SEQ ID NO: 3857 - RNA, 19 nt, artificial
  Chemically Synthesized
agguucuguugcccugauu

SEQ ID NO: 3858 - RNA, 19 nt, artificial
  Chemically Synthesized
uggaaguuaaugguuuuga

SEQ ID NO: 3859 - RNA, 19 nt, artificial
  Chemically Synthesized
ucccuuccuggagacuaaa

SEQ ID NO: 3860 - RNA, 19 nt, artificial
  Chemically Synthesized
agguggaaauccuacagcg

SEQ ID NO: 3861 - RNA, 19 nt, artificial
  Chemically Synthesized
aggaaaaagcaaauucugg

SEQ ID NO: 3862 - RNA, 19 nt, artificial
  Chemically Synthesized
gcaauuuaagcgggcugug

SEQ ID NO: 3863 - RNA, 19 nt, artificial
  Chemically Synthesized
ggaagccuguuugcaauuu

SEQ ID NO: 3864 - RNA, 19 nt, artificial
  Chemically Synthesized
cuccuuggagaaagguucu

SEQ ID NO: 3865 - RNA, 19 nt, artificial
  Chemically Synthesized
aggaagccuguuugcaauu

SEQ ID NO: 3866 - RNA, 19 nt, artificial
  Chemically Synthesized
uucuguugcccugauuuau

SEQ ID NO: 3867 - RNA, 19 nt, artificial
  Chemically Synthesized
agagcuggucuucuggucu

SEQ ID NO: 3868 - RNA, 19 nt, artificial
  Chemically Synthesized
uucuggaaguuaaugguuu

SEQ ID NO: 3869 - RNA, 19 nt, artificial
  Chemically Synthesized
aaauccuacagcgcgucau

SEQ ID NO: 3870 - RNA, 19 nt, artificial
  Chemically Synthesized
uuaaauccuugcuggcgga

SEQ ID NO: 3871 - RNA, 19 nt, artificial
  Chemically Synthesized
gaaagguucuguugcccug

SEQ ID NO: 3872 - RNA, 19 nt, artificial
  Chemically Synthesized
uaaggucucuucagagcgu

SEQ ID NO: 3873 - RNA, 19 nt, artificial
  Chemically Synthesized
aacgacaaaaggagcuuuu

SEQ ID NO: 3874 - RNA, 19 nt, artificial
  Chemically Synthesized
gucaucuccaacgacaaaa

SEQ ID NO: 3875 - RNA, 19 nt, artificial
  Chemically Synthesized
ccagguggaaauccuacag

SEQ ID NO: 3876 - RNA, 19 nt, artificial
  Chemically Synthesized
ccauuuugaauaaagaggc

SEQ ID NO: 3877 - RNA, 19 nt, artificial
  Chemically Synthesized
ucagcgcuuccucauucuu

SEQ ID NO: 3878 - RNA, 19 nt, artificial
  Chemically Synthesized
ggagaaagguucuguugcc

SEQ ID NO: 3879 - RNA, 19 nt, artificial
  Chemically Synthesized
ugcccacuugacuucacca

SEQ ID NO: 3880 - RNA, 19 nt, artificial
  Chemically Synthesized
cuacauucucgaccugcag

SEQ ID NO: 3881 - RNA, 19 nt, artificial
  Chemically Synthesized
gcagggaagcucaaagauc

SEQ ID NO: 3882 - RNA, 19 nt, artificial
  Chemically Synthesized
aaauccuugcuggcggaga

SEQ ID NO: 3883 - RNA, 19 nt, artificial
  Chemically Synthesized
guauauagguuuuguaccu

SEQ ID NO: 3884 - RNA, 19 nt, artificial
  Chemically Synthesized
aagguucuguugcccugau

SEQ ID NO: 3885 - RNA, 19 nt, artificial
  Chemically Synthesized
gacugugaacuuguggccu

SEQ ID NO: 3886 - RNA, 19 nt, artificial
  Chemically Synthesized
uugacuucaccaaaucccu

SEQ ID NO: 3887 - RNA, 19 nt, artificial
  Chemically Synthesized
ggucuccuuggagaaaggu

SEQ ID NO: 3888 - RNA, 19 nt, artificial
  Chemically Synthesized
uggucuucuggucuccuug

SEQ ID NO: 3889 - RNA, 19 nt, artificial
  Chemically Synthesized
ugcucuccaaacuaugcca

SEQ ID NO: 3890 - RNA, 19 nt, artificial
  Chemically Synthesized
uaaaccuggugcucaggag

SEQ ID NO: 3891 - RNA, 19 nt, artificial
  Chemically Synthesized
cuuccuggagacuaaaccu

SEQ ID NO: 3892 - RNA, 19 nt, artificial
  Chemically Synthesized
ucacuccggaacuugucau

SEQ ID NO: 3893 - RNA, 19 nt, artificial
  Chemically Synthesized
uugguuuucuuucucuuug

SEQ ID NO: 3894 - RNA, 19 nt, artificial
  Chemically Synthesized
gccuguuugcaauuuaagc

SEQ ID NO: 3895 - RNA, 19 nt, artificial
  Chemically Synthesized
gacuuucuguaacaaugcg

SEQ ID NO: 3896 - RNA, 19 nt, artificial
  Chemically Synthesized
aaagguucuguugcccuga

SEQ ID NO: 3897 - RNA, 19 nt, artificial
  Chemically Synthesized
caaguucuaaggucucuuc

SEQ ID NO: 3898 - RNA, 19 nt, artificial
  Chemically Synthesized
agacuaaaccuggugcuca

SEQ ID NO: 3899 - RNA, 19 nt, artificial
  Chemically Synthesized
ugacuucaccaaaucccuu

SEQ ID NO: 3900 - RNA, 19 nt, artificial
  Chemically Synthesized
aggagcuuuugccacugac

SEQ ID NO: 3901 - RNA, 19 nt, artificial
  Chemically Synthesized
aaggagcuuuugccacuga

SEQ ID NO: 3902 - RNA, 19 nt, artificial
  Chemically Synthesized
cgacaaaaggagcuuuugc

SEQ ID NO: 3903 - RNA, 19 nt, artificial
  Chemically Synthesized
uacaggaaggugacuuucu

SEQ ID NO: 3904 - RNA, 19 nt, artificial
  Chemically Synthesized
aguucuaaggucucuucag

SEQ ID NO: 3905 - RNA, 19 nt, artificial
  Chemically Synthesized
cuccggaacuugucaucuc

SEQ ID NO: 3906 - RNA, 19 nt, artificial
  Chemically Synthesized
gacgacaugaaccacugcu

SEQ ID NO: 3907 - RNA, 19 nt, artificial
  Chemically Synthesized
aaaaggagcuuuugccacu

SEQ ID NO: 3908 - RNA, 19 nt, artificial
  Chemically Synthesized
aauccuacagcgcgucauc

SEQ ID NO: 3909 - RNA, 19 nt, artificial
  Chemically Synthesized
agccuguuugcaauuuaag

SEQ ID NO: 3910 - RNA, 19 nt, artificial
  Chemically Synthesized
aucagcgcuuccucauucu

SEQ ID NO: 3911 - RNA, 19 nt, artificial
  Chemically Synthesized
uuuuuuacaggaaggugac

SEQ ID NO: 3912 - RNA, 19 nt, artificial
  Chemically Synthesized
ccuuggagaaagguucugu

SEQ ID NO: 3913 - RNA, 19 nt, artificial
  Chemically Synthesized
gcugcucuccaaacuaugc

SEQ ID NO: 3914 - RNA, 19 nt, artificial
  Chemically Synthesized
gccauuuugaauaaagagg

SEQ ID NO: 3915 - RNA, 19 nt, artificial
  Chemically Synthesized
cuggucuccuuggagaaag

SEQ ID NO: 3916 - RNA, 19 nt, artificial
  Chemically Synthesized
cuaaaccuggugcucagga

SEQ ID NO: 3917 - RNA, 19 nt, artificial
  Chemically Synthesized
caaauucuggaaguuaaug

SEQ ID NO: 3918 - RNA, 19 nt, artificial
  Chemically Synthesized
uucucgaccugcagguagu

SEQ ID NO: 3919 - RNA, 19 nt, artificial
  Chemically Synthesized
caucgacuacauucucgac

SEQ ID NO: 3920 - RNA, 19 nt, artificial
  Chemically Synthesized
gcuuagccagguggaaauc

SEQ ID NO: 3921 - RNA, 19 nt, artificial
  Chemically Synthesized
uggacgacaugaaccacug

SEQ ID NO: 3922 - RNA, 19 nt, artificial
  Chemically Synthesized
gauuuuuaaauccuugcug

SEQ ID NO: 3923 - RNA, 19 nt, artificial
  Chemically Synthesized
gucuccuuggagaaagguu

SEQ ID NO: 3924 - RNA, 19 nt, artificial
  Chemically Synthesized
cucuccaaacuaugccaag

SEQ ID NO: 3925 - RNA, 19 nt, artificial
  Chemically Synthesized
ucaucuccaacgacaaaag

SEQ ID NO: 3926 - RNA, 19 nt, artificial
  Chemically Synthesized
cacuccggaacuugucauc

SEQ ID NO: 3927 - RNA, 19 nt, artificial
  Chemically Synthesized
cgucaucgacuacauucuc

SEQ ID NO: 3928 - RNA, 19 nt, artificial
  Chemically Synthesized
ccucauucuuugaauccgc

SEQ ID NO: 3929 - RNA, 19 nt, artificial
  Chemically Synthesized
aucuccaacgacaaaagga

SEQ ID NO: 3930 - RNA, 19 nt, artificial
  Chemically Synthesized
cgcgucaucgacuacauuc

SEQ ID NO: 3931 - RNA, 19 nt, artificial
  Chemically Synthesized
guagcgggacuucuuuugg

SEQ ID NO: 3932 - RNA, 19 nt, artificial
  Chemically Synthesized
cucauucuuugaauccgcg

SEQ ID NO: 3933 - RNA, 19 nt, artificial
  Chemically Synthesized
ucuguugcccugauuuaug

SEQ ID NO: 3934 - RNA, 19 nt, artificial
  Chemically Synthesized
cccaaguucuaaggucucu

SEQ ID NO: 3935 - RNA, 19 nt, artificial
  Chemically Synthesized
ucuccaacgacaaaaggag

SEQ ID NO: 3936 - RNA, 19 nt, artificial
  Chemically Synthesized
uggagaaagguucuguugc

SEQ ID NO: 3937 - RNA, 19 nt, artificial
  Chemically Synthesized
ugaagagccagagcuagcu

SEQ ID NO: 3938 - RNA, 19 nt, artificial
  Chemically Synthesized
ucgacuacauucucgaccu

SEQ ID NO: 3939 - RNA, 19 nt, artificial
  Chemically Synthesized
uuagccagguggaaauccu

SEQ ID NO: 3940 - RNA, 19 nt, artificial
  Chemically Synthesized
aauaaagaggcgugccuuc

SEQ ID NO: 3941 - RNA, 19 nt, artificial
  Chemically Synthesized
ugaauaaagaggcgugccu

SEQ ID NO: 3942 - RNA, 19 nt, artificial
  Chemically Synthesized
gggaagcucaaagaucugg

SEQ ID NO: 3943 - RNA, 19 nt, artificial
  Chemically Synthesized
ugacuuucuguaacaaugc

SEQ ID NO: 3944 - RNA, 19 nt, artificial
  Chemically Synthesized
acugugaacuuguggccug

SEQ ID NO: 3945 - RNA, 19 nt, artificial
  Chemically Synthesized
cuggacgacaugaaccacu

SEQ ID NO: 3946 - RNA, 19 nt, artificial
  Chemically Synthesized
auucuggaaguuaaugguu

SEQ ID NO: 3947 - RNA, 19 nt, artificial
  Chemically Synthesized
caaaucccuuccuggagac

SEQ ID NO: 3948 - RNA, 19 nt, artificial
  Chemically Synthesized
caaaaggagcuuuugccac

SEQ ID NO: 3949 - RNA, 19 nt, artificial
  Chemically Synthesized
cagguggaaauccuacagc

SEQ ID NO: 3950 - RNA, 19 nt, artificial
  Chemically Synthesized
guuugcaauuuaagcgggc

SEQ ID NO: 3951 - RNA, 19 nt, artificial
  Chemically Synthesized
agccagguggaaauccuac

SEQ ID NO: 3952 - RNA, 19 nt, artificial
  Chemically Synthesized
aaucccuuccuggagacua

SEQ ID NO: 3953 - RNA, 19 nt, artificial
  Chemically Synthesized
uguagcgggacuucuuuug

SEQ ID NO: 3954 - RNA, 19 nt, artificial
  Chemically Synthesized
agaaagguucuguugcccu

SEQ ID NO: 3955 - RNA, 19 nt, artificial
  Chemically Synthesized
ucuccaaacuaugccaagg

SEQ ID NO: 3956 - RNA, 19 nt, artificial
  Chemically Synthesized
aggacugugaacuuguggc

SEQ ID NO: 3957 - RNA, 19 nt, artificial
  Chemically Synthesized
acuugucaucuccaacgac

SEQ ID NO: 3958 - RNA, 19 nt, artificial
  Chemically Synthesized
cauucuuugaauccgcggc

SEQ ID NO: 3959 - RNA, 19 nt, artificial
  Chemically Synthesized
uuguaccuuuuuuacagga

SEQ ID NO: 3960 - RNA, 19 nt, artificial
  Chemically Synthesized
aaguuaaugguuuugagug

SEQ ID NO: 3961 - RNA, 19 nt, artificial
  Chemically Synthesized
ucaccaaaucccuuccugg

SEQ ID NO: 3962 - RNA, 19 nt, artificial
  Chemically Synthesized
caucuccaacgacaaaagg

SEQ ID NO: 3963 - RNA, 19 nt, artificial
  Chemically Synthesized
acauucucgaccugcaggu

SEQ ID NO: 3964 - RNA, 19 nt, artificial
  Chemically Synthesized
ucacuguagcgggacuucu

SEQ ID NO: 3965 - RNA, 19 nt, artificial
  Chemically Synthesized
uuucuguaacaaugcgaug

SEQ ID NO: 3966 - RNA, 19 nt, artificial
  Chemically Synthesized
ucuucuggucuccuuggag

SEQ ID NO: 3967 - RNA, 19 nt, artificial
  Chemically Synthesized
acuccggaacuugucaucu

SEQ ID NO: 3968 - RNA, 19 nt, artificial
  Chemically Synthesized
gccaggaaaaagcaaauuc

SEQ ID NO: 3969 - RNA, 19 nt, artificial
  Chemically Synthesized
uuuugaauaaagaggcgug

SEQ ID NO: 3970 - RNA, 19 nt, artificial
  Chemically Synthesized
cuuccucauucuuugaauc

SEQ ID NO: 3971 - RNA, 19 nt, artificial
  Chemically Synthesized
aacacuuguguauaugaug

SEQ ID NO: 3972 - RNA, 19 nt, artificial
  Chemically Synthesized
uuuuuacaggaaggugacu

SEQ ID NO: 3973 - RNA, 19 nt, artificial
  Chemically Synthesized
ccuuuuuuacaggaaggug

SEQ ID NO: 3974 - RNA, 19 nt, artificial
  Chemically Synthesized
gcccugauuuaugaacucu

SEQ ID NO: 3975 - RNA, 19 nt, artificial
  Chemically Synthesized
cuggagacuaaaccuggug

SEQ ID NO: 3976 - RNA, 19 nt, artificial
  Chemically Synthesized
ccuuccuggagacuaaacc

SEQ ID NO: 3977 - RNA, 19 nt, artificial
  Chemically Synthesized
cuucaccaaaucccuuccu

SEQ ID NO: 3978 - RNA, 19 nt, artificial
  Chemically Synthesized
acgacaaaaggagcuuuug

SEQ ID NO: 3979 - RNA, 19 nt, artificial
  Chemically Synthesized
cuccaacgacaaaaggagc

SEQ ID NO: 3980 - RNA, 19 nt, artificial
  Chemically Synthesized
cuguuugcaauuuaagcgg

SEQ ID NO: 3981 - RNA, 19 nt, artificial
  Chemically Synthesized
uaccuuuuuuacaggaagg

SEQ ID NO: 3982 - RNA, 19 nt, artificial
  Chemically Synthesized
uuggagaaagguucuguug

SEQ ID NO: 3983 - RNA, 19 nt, artificial
  Chemically Synthesized
cuggaaguuaaugguuuug

SEQ ID NO: 3984 - RNA, 19 nt, artificial
  Chemically Synthesized
cuaaggucucuucagagcg

SEQ ID NO: 3985 - RNA, 19 nt, artificial
  Chemically Synthesized
aagagccagagcuagcucu

SEQ ID NO: 3986 - RNA, 19 nt, artificial
  Chemically Synthesized
aaggacugugaacuugugg

SEQ ID NO: 3987 - RNA, 19 nt, artificial
  Chemically Synthesized
uccuggagacuaaaccugg

SEQ ID NO: 3988 - RNA, 19 nt, artificial
  Chemically Synthesized
aaaaagcaaauucuggaag

SEQ ID NO: 3989 - RNA, 19 nt, artificial
  Chemically Synthesized
acaugaaccacugcuacuc

SEQ ID NO: 3990 - RNA, 19 nt, artificial
  Chemically Synthesized
gcaggcucuauaagugacc

SEQ ID NO: 3991 - RNA, 19 nt, artificial
  Chemically Synthesized
auucuuugaauccgcggcu

SEQ ID NO: 3992 - RNA, 19 nt, artificial
  Chemically Synthesized
gugauuuuuaaauccuugc

SEQ ID NO: 3993 - RNA, 19 nt, artificial
  Chemically Synthesized
ugcccugauuuaugaacuc

SEQ ID NO: 3994 - RNA, 19 nt, artificial
  Chemically Synthesized
gacaaaaggagcuuuugcc

SEQ ID NO: 3995 - RNA, 19 nt, artificial
  Chemically Synthesized
ugccaggaaaaagcaaauu

SEQ ID NO: 3996 - RNA, 19 nt, artificial
  Chemically Synthesized
gaacuugucaucuccaacg

SEQ ID NO: 3997 - RNA, 19 nt, artificial
  Chemically Synthesized
uguuugcaauuuaagcggg

SEQ ID NO: 3998 - RNA, 19 nt, artificial
  Chemically Synthesized
ucuccuuggagaaagguuc

SEQ ID NO: 3999 - RNA, 19 nt, artificial
  Chemically Synthesized
aaauucuggaaguuaaugg

SEQ ID NO: 4000 - RNA, 19 nt, artificial
  Chemically Synthesized
accaaaucccuuccuggag

SEQ ID NO: 4001 - RNA, 19 nt, artificial
  Chemically Synthesized
ugcaauuuaagcgggcugu

SEQ ID NO: 4002 - RNA, 19 nt, artificial
  Chemically Synthesized
ucauucuuugaauccgcgg

SEQ ID NO: 4003 - RNA, 19 nt, artificial
  Chemically Synthesized
uucuaaggucucuucagag

SEQ ID NO: 4004 - RNA, 19 nt, artificial
  Chemically Synthesized
cccuuccuggagacuaaac

SEQ ID NO: 4005 - RNA, 19 nt, artificial
  Chemically Synthesized
uccggaacuugucaucucc

SEQ ID NO: 4006 - RNA, 19 nt, artificial
  Chemically Synthesized
uuugcaauuuaagcgggcu

SEQ ID NO: 4007 - RNA, 19 nt, artificial
  Chemically Synthesized
gagcuuuugccacugacuc

SEQ ID NO: 4008 - RNA, 19 nt, artificial
  Chemically Synthesized
caugaaccacugcuacucc

SEQ ID NO: 4009 - RNA, 19 nt, artificial
  Chemically Synthesized
caggcucuauaagugaccg

SEQ ID NO: 4010 - RNA, 19 nt, artificial
  Chemically Synthesized
ccuguuugcaauuuaagcg

SEQ ID NO: 4011 - RNA, 19 nt, artificial
  Chemically Synthesized
uugcccugauuuaugaacu

SEQ ID NO: 4012 - RNA, 19 nt, artificial
  Chemically Synthesized
gagacuaaaccuggugcuc

SEQ ID NO: 4013 - RNA, 19 nt, artificial
  Chemically Synthesized
uucuguaacaaugcgaugu

SEQ ID NO: 4014 - RNA, 19 nt, artificial
  Chemically Synthesized
aaggucucuucagagcgug

SEQ ID NO: 4015 - RNA, 19 nt, artificial
  Chemically Synthesized
aaaggagcuuuugccacug

SEQ ID NO: 4016 - RNA, 19 nt, artificial
  Chemically Synthesized
gacuacauucucgaccugc

SEQ ID NO: 4017 - RNA, 19 nt, artificial
  Chemically Synthesized
gagaaagguucuguugccc

SEQ ID NO: 4018 - RNA, 19 nt, artificial
  Chemically Synthesized
uucaccaaaucccuuccug

SEQ ID NO: 4019 - RNA, 19 nt, artificial
  Chemically Synthesized
acuucaccaaaucccuucc

SEQ ID NO: 4020 - RNA, 19 nt, artificial
  Chemically Synthesized
auuuuuaaauccuugcugg

SEQ ID NO: 4021 - RNA, 19 nt, artificial
  Chemically Synthesized
cuugacuucaccaaauccc

SEQ ID NO: 4022 - RNA, 19 nt, artificial
  Chemically Synthesized
auuuugaauaaagaggcgu

SEQ ID NO: 4023 - RNA, 19 nt, artificial
  Chemically Synthesized
uccucauucuuugaauccg

SEQ ID NO: 4024 - RNA, 19 nt, artificial
  Chemically Synthesized
uuacaggaaggugacuuuc

SEQ ID NO: 4025 - RNA, 19 nt, artificial
  Chemically Synthesized
accuuuuuuacaggaaggu

SEQ ID NO: 4026 - RNA, 19 nt, artificial
  Chemically Synthesized
uacauucucgaccugcagg

SEQ ID NO: 4027 - RNA, 19 nt, artificial
  Chemically Synthesized
uuuuacaggaaggugacuu

SEQ ID NO: 4028 - RNA, 19 nt, artificial
  Chemically Synthesized
aguauauagguuuuguacc

SEQ ID NO: 4029 - RNA, 19 nt, artificial
  Chemically Synthesized
uccaaacuaugccaaggcg

SEQ ID NO: 4030 - RNA, 19 nt, artificial
  Chemically Synthesized
gacuucaccaaaucccuuc

SEQ ID NO: 4031 - RNA, 19 nt, artificial
  Chemically Synthesized
acuugacuucaccaaaucc

SEQ ID NO: 4032 - RNA, 19 nt, artificial
  Chemically Synthesized
guugcccugauuuaugaac

SEQ ID NO: 4033 - RNA, 19 nt, artificial
  Chemically Synthesized
agcuuuugccacugacucg

SEQ ID NO: 4034 - RNA, 19 nt, artificial
  Chemically Synthesized
uugcuggacgacaugaacc

SEQ ID NO: 4035 - RNA, 19 nt, artificial
  Chemically Synthesized
uuugaauaaagaggcgugc

SEQ ID NO: 4036 - RNA, 19 nt, artificial
  Chemically Synthesized
ucuaaggucucuucagagc

SEQ ID NO: 4037 - RNA, 19 nt, artificial
  Chemically Synthesized
uugcaauuuaagcgggcug

SEQ ID NO: 4038 - RNA, 19 nt, artificial
  Chemically Synthesized
gucaucgacuacauucucg

SEQ ID NO: 4039 - RNA, 19 nt, artificial
  Chemically Synthesized
cugcucuccaaacuaugcc

SEQ ID NO: 4040 - RNA, 19 nt, artificial
  Chemically Synthesized
acuaaaccuggugcucagg

SEQ ID NO: 4041 - RNA, 19 nt, artificial
  Chemically Synthesized
uggagacuaaaccuggugc

SEQ ID NO: 4042 - RNA, 19 nt, artificial
  Chemically Synthesized
aaaucccuuccuggagacu

SEQ ID NO: 4043 - RNA, 19 nt, artificial
  Chemically Synthesized
uccaacgacaaaaggagcu

SEQ ID NO: 4044 - RNA, 19 nt, artificial
  Chemically Synthesized
uaucagcgcuuccucauuc

SEQ ID NO: 4045 - RNA, 19 nt, artificial
  Chemically Synthesized
uuuaaauccuugcuggcgg

SEQ ID NO: 4046 - RNA, 19 nt, artificial
  Chemically Synthesized
auucucgaccugcagguag

SEQ ID NO: 4047 - RNA, 19 nt, artificial
  Chemically Synthesized
cuccaaacuaugccaaggc

SEQ ID NO: 4048 - RNA, 19 nt, artificial
  Chemically Synthesized
uuuguaccuuuuuuacagg

SEQ ID NO: 4049 - RNA, 19 nt, artificial
  Chemically Synthesized
uuccuggagacuaaaccug

SEQ ID NO: 4050 - RNA, 19 nt, artificial
  Chemically Synthesized
augaaccacugcuacuccc

SEQ ID NO: 4051 - RNA, 19 nt, artificial
  Chemically Synthesized
uuuuuaaauccuugcuggc

SEQ ID NO: 4052 - RNA, 19 nt, artificial
  Chemically Synthesized
aggcucuauaagugaccgc

SEQ ID NO: 4053 - RNA, 19 nt, artificial
  Chemically Synthesized
aacuuguggccugaagagc

SEQ ID NO: 4054 - RNA, 19 nt, artificial
  Chemically Synthesized
uuuaagcgggcugugaacg

SEQ ID NO: 4055 - RNA, 19 nt, artificial
  Chemically Synthesized
uccuuggagaaagguucug

SEQ ID NO: 4056 - RNA, 19 nt, artificial
  Chemically Synthesized
cuuagccagguggaaaucc

SEQ ID NO: 4057 - RNA, 19 nt, artificial
  Chemically Synthesized
uucuuugaauccgcggcuc

SEQ ID NO: 4058 - RNA, 19 nt, artificial
  Chemically Synthesized
uaaauccuugcuggcggag

SEQ ID NO: 4059 - RNA, 19 nt, artificial
  Chemically Synthesized
uuuuaaauccuugcuggcg

SEQ ID NO: 4060 - RNA, 19 nt, artificial
  Chemically Synthesized
auaaagaggcgugccuucc

SEQ ID NO: 4061 - RNA, 19 nt, artificial
  Chemically Synthesized
uugaauaaagaggcgugcc

SEQ ID NO: 4062 - RNA, 19 nt, artificial
  Chemically Synthesized
aucgacuacauucucgacc

SEQ ID NO: 4063 - RNA, 19 nt, artificial
  Chemically Synthesized
uuccucauucuuugaaucc

SEQ ID NO: 4064 - RNA, 19 nt, artificial
  Chemically Synthesized
aagaaaaccaaaagaaguc

SEQ ID NO: 4065 - RNA, 19 nt, artificial
  Chemically Synthesized
ucuuuauucaaaauggccc

SEQ ID NO: 4066 - RNA, 19 nt, artificial
  Chemically Synthesized
uugcaaacaggcuuccucc

SEQ ID NO: 4067 - RNA, 19 nt, artificial
  Chemically Synthesized
agaaaaccaaaagaagucc

SEQ ID NO: 4068 - RNA, 19 nt, artificial
  Chemically Synthesized
uuaacuuccagaauuugcu

SEQ ID NO: 4069 - RNA, 19 nt, artificial
  Chemically Synthesized
auuaacuuccagaauuugc

SEQ ID NO: 4070 - RNA, 19 nt, artificial
  Chemically Synthesized
uuuggugaagucaaguggg

SEQ ID NO: 4071 - RNA, 19 nt, artificial
  Chemically Synthesized
agagaaagaaaaccaaaag

SEQ ID NO: 4072 - RNA, 19 nt, artificial
  Chemically Synthesized
uucaugucguccagcaagc

SEQ ID NO: 4073 - RNA, 19 nt, artificial
  Chemically Synthesized
uuaaauugcaaacaggcuu

SEQ ID NO: 4074 - RNA, 19 nt, artificial
  Chemically Synthesized
cucaaaaccauuaacuucc

SEQ ID NO: 4075 - RNA, 19 nt, artificial
  Chemically Synthesized
uccagaauuugcuuuuucc

SEQ ID NO: 4076 - RNA, 19 nt, artificial
  Chemically Synthesized
auugcaaacaggcuuccuc

SEQ ID NO: 4077 - RNA, 19 nt, artificial
  Chemically Synthesized
uagaguucauaaaucaggg

SEQ ID NO: 4078 - RNA, 19 nt, artificial
  Chemically Synthesized
uucacaguccuucgcuccu

SEQ ID NO: 4079 - RNA, 19 nt, artificial
  Chemically Synthesized
uuggagaugacaaguuccg

SEQ ID NO: 4080 - RNA, 19 nt, artificial
  Chemically Synthesized
aaaaccaaaagaagucccg

SEQ ID NO: 4081 - RNA, 19 nt, artificial
  Chemically Synthesized
uuuauucaaaauggcccgc

SEQ ID NO: 4082 - RNA, 19 nt, artificial
  Chemically Synthesized
agaucuuugagcuucccug

SEQ ID NO: 4083 - RNA, 19 nt, artificial
  Chemically Synthesized
uuccagaauuugcuuuuuc

SEQ ID NO: 4084 - RNA, 19 nt, artificial
  Chemically Synthesized
augucguccagcaagcuca

SEQ ID NO: 4085 - RNA, 19 nt, artificial
  Chemically Synthesized
uuauucaaaauggcccgcc

SEQ ID NO: 4086 - RNA, 19 nt, artificial
  Chemically Synthesized
uucacagcccgcuuaaauu

SEQ ID NO: 4087 - RNA, 19 nt, artificial
  Chemically Synthesized
aaaccaaaagaagucccgc

SEQ ID NO: 4088 - RNA, 19 nt, artificial
  Chemically Synthesized
uuguuacagaaagucaccu

SEQ ID NO: 4089 - RNA, 19 nt, artificial
  Chemically Synthesized
uaaauugcaaacaggcuuc

SEQ ID NO: 4090 - RNA, 19 nt, artificial
  Chemically Synthesized
auuguuacagaaagucacc

SEQ ID NO: 4091 - RNA, 19 nt, artificial
  Chemically Synthesized
ucuucaggccacaaguuca

SEQ ID NO: 4092 - RNA, 19 nt, artificial
  Chemically Synthesized
ucaggccacaaguucacag

SEQ ID NO: 4093 - RNA, 19 nt, artificial
  Chemically Synthesized
agaauuugcuuuuuccugg

SEQ ID NO: 4094 - RNA, 19 nt, artificial
  Chemically Synthesized
uauagagccugccuggaag

SEQ ID NO: 4095 - RNA, 19 nt, artificial
  Chemically Synthesized
gaaagaaaaccaaaagaag

SEQ ID NO: 4096 - RNA, 19 nt, artificial
  Chemically Synthesized
ucacucaaaaccauuaacu

SEQ ID NO: 4097 - RNA, 19 nt, artificial
  Chemically Synthesized
aaccaaaagaagucccgcu

SEQ ID NO: 4098 - RNA, 19 nt, artificial
  Chemically Synthesized
uuugcuuuuuccuggcagc

SEQ ID NO: 4099 - RNA, 19 nt, artificial
  Chemically Synthesized
ucuccaggaagggauuugg

SEQ ID NO: 4100 - RNA, 19 nt, artificial
  Chemically Synthesized
uguaggauuuccaccuggc

SEQ ID NO: 4101 - RNA, 19 nt, artificial
  Chemically Synthesized
ucacagcccgcuuaaauug

SEQ ID NO: 4102 - RNA, 19 nt, artificial
  Chemically Synthesized
auucaaaauggcccgccuc

SEQ ID NO: 4103 - RNA, 19 nt, artificial
  Chemically Synthesized
auacaucgcauuguuacag

SEQ ID NO: 4104 - RNA, 19 nt, artificial
  Chemically Synthesized
ucauaaaucagggcaacag

SEQ ID NO: 4105 - RNA, 19 nt, artificial
  Chemically Synthesized
auuuccaccuggcuaagcu

SEQ ID NO: 4106 - RNA, 19 nt, artificial
  Chemically Synthesized
ucaaagaaugaggaagcgc

SEQ ID NO: 4107 - RNA, 19 nt, artificial
  Chemically Synthesized
cacaaguguuuaaaaaucg

SEQ ID NO: 4108 - RNA, 19 nt, artificial
  Chemically Synthesized
uaaaucagggcaacagaac

SEQ ID NO: 4109 - RNA, 19 nt, artificial
  Chemically Synthesized
aaaucagggcaacagaacc

SEQ ID NO: 4110 - RNA, 19 nt, artificial
  Chemically Synthesized
gagaaagaaaaccaaaaga

SEQ ID NO: 4111 - RNA, 19 nt, artificial
  Chemically Synthesized
ucaccuuccuguaaaaaag

SEQ ID NO: 4112 - RNA, 19 nt, artificial
  Chemically Synthesized
uuggugaagucaagugggc

SEQ ID NO: 4113 - RNA, 19 nt, artificial
  Chemically Synthesized
uagcagugguucaugucgu

SEQ ID NO: 4114 - RNA, 19 nt, artificial
  Chemically Synthesized
acuuauagagccugccugg

SEQ ID NO: 4115 - RNA, 19 nt, artificial
  Chemically Synthesized
cuuuauucaaaauggcccg

SEQ ID NO: 4116 - RNA, 19 nt, artificial
  Chemically Synthesized
augaggaagcgcugauacc

SEQ ID NO: 4117 - RNA, 19 nt, artificial
  Chemically Synthesized
ucacuuauagagccugccu

SEQ ID NO: 4118 - RNA, 19 nt, artificial
  Chemically Synthesized
aacagaaccuuucuccaag

SEQ ID NO: 4119 - RNA, 19 nt, artificial
  Chemically Synthesized
guagcagugguucaugucg

SEQ ID NO: 4120 - RNA, 19 nt, artificial
  Chemically Synthesized
aaaaccauuaacuuccaga

SEQ ID NO: 4121 - RNA, 19 nt, artificial
  Chemically Synthesized
accagguuuagucuccagg

SEQ ID NO: 4122 - RNA, 19 nt, artificial
  Chemically Synthesized
cucuuuauucaaaauggcc

SEQ ID NO: 4123 - RNA, 19 nt, artificial
  Chemically Synthesized
aucgcauuguuacagaaag

SEQ ID NO: 4124 - RNA, 19 nt, artificial
  Chemically Synthesized
acucaaaaccauuaacuuc

SEQ ID NO: 4125 - RNA, 19 nt, artificial
  Chemically Synthesized
uuggcauaguuuggagagc

SEQ ID NO: 4126 - RNA, 19 nt, artificial
  Chemically Synthesized
uuugucguuggagaugaca

SEQ ID NO: 4127 - RNA, 19 nt, artificial
  Chemically Synthesized
uaggauuuccaccuggcua

SEQ ID NO: 4128 - RNA, 19 nt, artificial
  Chemically Synthesized
auuugcuuuuuccuggcag

SEQ ID NO: 4129 - RNA, 19 nt, artificial
  Chemically Synthesized
aagaagucccgcuacagug

SEQ ID NO: 4130 - RNA, 19 nt, artificial
  Chemically Synthesized
aucuuugagcuucccugcc

SEQ ID NO: 4131 - RNA, 19 nt, artificial
  Chemically Synthesized
uucaggccacaaguucaca

SEQ ID NO: 4132 - RNA, 19 nt, artificial
  Chemically Synthesized
uucuggaggugucaggaca

SEQ ID NO: 4133 - RNA, 19 nt, artificial
  Chemically Synthesized
uugucguuggagaugacaa

SEQ ID NO: 4134 - RNA, 19 nt, artificial
  Chemically Synthesized
cagaauuugcuuuuuccug

SEQ ID NO: 4135 - RNA, 19 nt, artificial
  Chemically Synthesized
gaaaaccaaaagaaguccc

SEQ ID NO: 4136 - RNA, 19 nt, artificial
  Chemically Synthesized
uacagaaagucaccuuccu

SEQ ID NO: 4137 - RNA, 19 nt, artificial
  Chemically Synthesized
cauaguuuggagagcagcc

SEQ ID NO: 4138 - RNA, 19 nt, artificial
  Chemically Synthesized
guucaugucguccagcaag

SEQ ID NO: 4139 - RNA, 19 nt, artificial
  Chemically Synthesized
uugcuuuuuccuggcagca

SEQ ID NO: 4140 - RNA, 19 nt, artificial
  Chemically Synthesized
ucugaagagaccuuagaac

SEQ ID NO: 4141 - RNA, 19 nt, artificial
  Chemically Synthesized
aaagaaugaggaagcgcug

SEQ ID NO: 4142 - RNA, 19 nt, artificial
  Chemically Synthesized
cugagcaccagguuuaguc

SEQ ID NO: 4143 - RNA, 19 nt, artificial
  Chemically Synthesized
agucaguggcaaaagcucc

SEQ ID NO: 4144 - RNA, 19 nt, artificial
  Chemically Synthesized
uuauagagccugccuggaa

SEQ ID NO: 4145 - RNA, 19 nt, artificial
  Chemically Synthesized
uuccuguaaaaaagguaca

SEQ ID NO: 4146 - RNA, 19 nt, artificial
  Chemically Synthesized
uaguuuggagagcagccac

SEQ ID NO: 4147 - RNA, 19 nt, artificial
  Chemically Synthesized
uccaggaagggauuuggug

SEQ ID NO: 4148 - RNA, 19 nt, artificial
  Chemically Synthesized
uggagaugacaaguuccgg

SEQ ID NO: 4149 - RNA, 19 nt, artificial
  Chemically Synthesized
agaauguagucgaugacgc

SEQ ID NO: 4150 - RNA, 19 nt, artificial
  Chemically Synthesized
auguagucgaugacgcgcu

SEQ ID NO: 4151 - RNA, 19 nt, artificial
  Chemically Synthesized
uuccaccuggcuaagcuga

SEQ ID NO: 4152 - RNA, 19 nt, artificial
  Chemically Synthesized
cacuuauagagccugccug

SEQ ID NO: 4153 - RNA, 19 nt, artificial
  Chemically Synthesized
uccaaggagaccagaagac

SEQ ID NO: 4154 - RNA, 19 nt, artificial
  Chemically Synthesized
aagagaccuuagaacuugg

SEQ ID NO: 4155 - RNA, 19 nt, artificial
  Chemically Synthesized
aaguucacaguccuucgcu

SEQ ID NO: 4156 - RNA, 19 nt, artificial
  Chemically Synthesized
uuagucuccaggaagggau

SEQ ID NO: 4157 - RNA, 19 nt, artificial
  Chemically Synthesized
aaaagaagucccgcuacag

SEQ ID NO: 4158 - RNA, 19 nt, artificial
  Chemically Synthesized
aaagaagucccgcuacagu

SEQ ID NO: 4159 - RNA, 19 nt, artificial
  Chemically Synthesized
guacaaaaccuauauacuc

SEQ ID NO: 4160 - RNA, 19 nt, artificial
  Chemically Synthesized
ugacaaguuccggagugag

SEQ ID NO: 4161 - RNA, 19 nt, artificial
  Chemically Synthesized
ugcaggucgagaauguagu

SEQ ID NO: 4162 - RNA, 19 nt, artificial
  Chemically Synthesized
agcaccagguuuagucucc

SEQ ID NO: 4163 - RNA, 19 nt, artificial
  Chemically Synthesized
caaagaaugaggaagcgcu

SEQ ID NO: 4164 - RNA, 19 nt, artificial
  Chemically Synthesized
uuucuccaaggagaccaga

SEQ ID NO: 4165 - RNA, 19 nt, artificial
  Chemically Synthesized
aaagcuccuuuugucguug

SEQ ID NO: 4166 - RNA, 19 nt, artificial
  Chemically Synthesized
gucacuuauagagccugcc

SEQ ID NO: 4167 - RNA, 19 nt, artificial
  Chemically Synthesized
auucaaagaaugaggaagc

SEQ ID NO: 4168 - RNA, 19 nt, artificial
  Chemically Synthesized
cuuccuguaaaaaagguac

SEQ ID NO: 4169 - RNA, 19 nt, artificial
  Chemically Synthesized
uucauaaaucagggcaaca

SEQ ID NO: 4170 - RNA, 19 nt, artificial
  Chemically Synthesized
ucuccaaggagaccagaag

SEQ ID NO: 4171 - RNA, 19 nt, artificial
  Chemically Synthesized
uaacuuccagaauuugcuu

SEQ ID NO: 4172 - RNA, 19 nt, artificial
  Chemically Synthesized
ugacgcgcuguaggauuuc

SEQ ID NO: 4173 - RNA, 19 nt, artificial
  Chemically Synthesized
aguagcagugguucauguc

SEQ ID NO: 4174 - RNA, 19 nt, artificial
  Chemically Synthesized
cccaaagagaaagaaaacc

SEQ ID NO: 4175 - RNA, 19 nt, artificial
  Chemically Synthesized
acagaaagucaccuuccug

SEQ ID NO: 4176 - RNA, 19 nt, artificial
  Chemically Synthesized
aucacucaaaaccauuaac

SEQ ID NO: 4177 - RNA, 19 nt, artificial
  Chemically Synthesized
cuucaggccacaaguucac

SEQ ID NO: 4178 - RNA, 19 nt, artificial
  Chemically Synthesized
uauucaaaauggcccgccu

SEQ ID NO: 4179 - RNA, 19 nt, artificial
  Chemically Synthesized
ugcuuuuuccuggcagcac

SEQ ID NO: 4180 - RNA, 19 nt, artificial
  Chemically Synthesized
ugaagagaccuuagaacuu

SEQ ID NO: 4181 - RNA, 19 nt, artificial
  Chemically Synthesized
caggucgagaauguagucg

SEQ ID NO: 4182 - RNA, 19 nt, artificial
  Chemically Synthesized
aguucacaguccuucgcuc

SEQ ID NO: 4183 - RNA, 19 nt, artificial
  Chemically Synthesized
ugucguuggagaugacaag

SEQ ID NO: 4184 - RNA, 19 nt, artificial
  Chemically Synthesized
aaggcacgccucuuuauuc

SEQ ID NO: 4185 - RNA, 19 nt, artificial
  Chemically Synthesized
cagaucuuugagcuucccu

SEQ ID NO: 4186 - RNA, 19 nt, artificial
  Chemically Synthesized
guuggagaugacaaguucc

SEQ ID NO: 4187 - RNA, 19 nt, artificial
  Chemically Synthesized
acuuccagaauuugcuuuu

SEQ ID NO: 4188 - RNA, 19 nt, artificial
  Chemically Synthesized
ccaaagagaaagaaaacca

SEQ ID NO: 4189 - RNA, 19 nt, artificial
  Chemically Synthesized
ucguuggagaugacaaguu

SEQ ID NO: 4190 - RNA, 19 nt, artificial
  Chemically Synthesized
acaaguuccggagugagcu

SEQ ID NO: 4191 - RNA, 19 nt, artificial
  Chemically Synthesized
uaccugcaggucgagaaug

SEQ ID NO: 4192 - RNA, 19 nt, artificial
  Chemically Synthesized
accaaaagaagucccgcua

SEQ ID NO: 4193 - RNA, 19 nt, artificial
  Chemically Synthesized
ccuuucuccaaggagacca

SEQ ID NO: 4194 - RNA, 19 nt, artificial
  Chemically Synthesized
uucuccaaggagaccagaa

SEQ ID NO: 4195 - RNA, 19 nt, artificial
  Chemically Synthesized
aguuuggagagcagccacu

SEQ ID NO: 4196 - RNA, 19 nt, artificial
  Chemically Synthesized
accauuaacuuccagaauu

SEQ ID NO: 4197 - RNA, 19 nt, artificial
  Chemically Synthesized
uggcaaaagcuccuuuugu

SEQ ID NO: 4198 - RNA, 19 nt, artificial
  Chemically Synthesized
ugguucaugucguccagca

SEQ ID NO: 4199 - RNA, 19 nt, artificial
  Chemically Synthesized
uggaaggcacgccucuuua

SEQ ID NO: 4200 - RNA, 19 nt, artificial
  Chemically Synthesized
guucacagcccgcuuaaau

SEQ ID NO: 4201 - RNA, 19 nt, artificial
  Chemically Synthesized
uucaaagaaugaggaagcg

SEQ ID NO: 4202 - RNA, 19 nt, artificial
  Chemically Synthesized
cccagaucuuugagcuucc

SEQ ID NO: 4203 - RNA, 19 nt, artificial
  Chemically Synthesized
aaugaggaagcgcugauac

SEQ ID NO: 4204 - RNA, 19 nt, artificial
  Chemically Synthesized
ucaucauauacacaagugu

SEQ ID NO: 4205 - RNA, 19 nt, artificial
  Chemically Synthesized
ucgcauuguuacagaaagu

SEQ ID NO: 4206 - RNA, 19 nt, artificial
  Chemically Synthesized
aagcuccuuuugucguugg

SEQ ID NO: 4207 - RNA, 19 nt, artificial
  Chemically Synthesized
ucgagaauguagucgauga

SEQ ID NO: 4208 - RNA, 19 nt, artificial
  Chemically Synthesized
acgcgcuguaggauuucca

SEQ ID NO: 4209 - RNA, 19 nt, artificial
  Chemically Synthesized
ucaugucguccagcaagcu

SEQ ID NO: 4210 - RNA, 19 nt, artificial
  Chemically Synthesized
cgccucuuuauucaaaaug

SEQ ID NO: 4211 - RNA, 19 nt, artificial
  Chemically Synthesized
aacuuccagaauuugcuuu

SEQ ID NO: 4212 - RNA, 19 nt, artificial
  Chemically Synthesized
aaagucaccuuccuguaaa

SEQ ID NO: 4213 - RNA, 19 nt, artificial
  Chemically Synthesized
guaaaaaagguacaaaacc

SEQ ID NO: 4214 - RNA, 19 nt, artificial
  Chemically Synthesized
aaucagggcaacagaaccu

SEQ ID NO: 4215 - RNA, 19 nt, artificial
  Chemically Synthesized
ucaaaaccauuaacuucca

SEQ ID NO: 4216 - RNA, 19 nt, artificial
  Chemically Synthesized
uuuagucuccaggaaggga

SEQ ID NO: 4217 - RNA, 19 nt, artificial
  Chemically Synthesized
cgcuguaggauuuccaccu

SEQ ID NO: 4218 - RNA, 19 nt, artificial
  Chemically Synthesized
ccagaauuugcuuuuuccu

SEQ ID NO: 4219 - RNA, 19 nt, artificial
  Chemically Synthesized
cacagcccgcuuaaauugc

SEQ ID NO: 4220 - RNA, 19 nt, artificial
  Chemically Synthesized
aaauugcaaacaggcuucc

SEQ ID NO: 4221 - RNA, 19 nt, artificial
  Chemically Synthesized
agaaccuuucuccaaggag

SEQ ID NO: 4222 - RNA, 19 nt, artificial
  Chemically Synthesized
aauugcaaacaggcuuccu

SEQ ID NO: 4223 - RNA, 19 nt, artificial
  Chemically Synthesized
auaaaucagggcaacagaa

SEQ ID NO: 4224 - RNA, 19 nt, artificial
  Chemically Synthesized
agaccagaagaccagcucu

SEQ ID NO: 4225 - RNA, 19 nt, artificial
  Chemically Synthesized
aaaccauuaacuuccagaa

SEQ ID NO: 4226 - RNA, 19 nt, artificial
  Chemically Synthesized
augacgcgcuguaggauuu

SEQ ID NO: 4227 - RNA, 19 nt, artificial
  Chemically Synthesized
uccgccagcaaggauuuaa

SEQ ID NO: 4228 - RNA, 19 nt, artificial
  Chemically Synthesized
cagggcaacagaaccuuuc

SEQ ID NO: 4229 - RNA, 19 nt, artificial
  Chemically Synthesized
acgcucugaagagaccuua

SEQ ID NO: 4230 - RNA, 19 nt, artificial
  Chemically Synthesized
aaaagcuccuuuugucguu

SEQ ID NO: 4231 - RNA, 19 nt, artificial
  Chemically Synthesized
uuuugucguuggagaugac

SEQ ID NO: 4232 - RNA, 19 nt, artificial
  Chemically Synthesized
cuguaggauuuccaccugg

SEQ ID NO: 4233 - RNA, 19 nt, artificial
  Chemically Synthesized
gccucuuuauucaaaaugg

SEQ ID NO: 4234 - RNA, 19 nt, artificial
  Chemically Synthesized
aagaaugaggaagcgcuga

SEQ ID NO: 4235 - RNA, 19 nt, artificial
  Chemically Synthesized
ggcaacagaaccuuucucc

SEQ ID NO: 4236 - RNA, 19 nt, artificial
  Chemically Synthesized
uggugaagucaagugggca

SEQ ID NO: 4237 - RNA, 19 nt, artificial
  Chemically Synthesized
cugcaggucgagaauguag

SEQ ID NO: 4238 - RNA, 19 nt, artificial
  Chemically Synthesized
gaucuuugagcuucccugc

SEQ ID NO: 4239 - RNA, 19 nt, artificial
  Chemically Synthesized
ucuccgccagcaaggauuu

SEQ ID NO: 4240 - RNA, 19 nt, artificial
  Chemically Synthesized
agguacaaaaccuauauac

SEQ ID NO: 4241 - RNA, 19 nt, artificial
  Chemically Synthesized
aucagggcaacagaaccuu

SEQ ID NO: 4242 - RNA, 19 nt, artificial
  Chemically Synthesized
aggccacaaguucacaguc

SEQ ID NO: 4243 - RNA, 19 nt, artificial
  Chemically Synthesized
agggauuuggugaagucaa

SEQ ID NO: 4244 - RNA, 19 nt, artificial
  Chemically Synthesized
accuuucuccaaggagacc

SEQ ID NO: 4245 - RNA, 19 nt, artificial
  Chemically Synthesized
caaggagaccagaagacca

SEQ ID NO: 4246 - RNA, 19 nt, artificial
  Chemically Synthesized
uggcauaguuuggagagca

SEQ ID NO: 4247 - RNA, 19 nt, artificial
  Chemically Synthesized
cuccugagcaccagguuua

SEQ ID NO: 4248 - RNA, 19 nt, artificial
  Chemically Synthesized
agguuuagucuccaggaag

SEQ ID NO: 4249 - RNA, 19 nt, artificial
  Chemically Synthesized
augacaaguuccggaguga

SEQ ID NO: 4250 - RNA, 19 nt, artificial
  Chemically Synthesized
caaagagaaagaaaaccaa

SEQ ID NO: 4251 - RNA, 19 nt, artificial
  Chemically Synthesized
gcuuaaauugcaaacaggc

SEQ ID NO: 4252 - RNA, 19 nt, artificial
  Chemically Synthesized
cgcauuguuacagaaaguc

SEQ ID NO: 4253 - RNA, 19 nt, artificial
  Chemically Synthesized
ucagggcaacagaaccuuu

SEQ ID NO: 4254 - RNA, 19 nt, artificial
  Chemically Synthesized
gaagagaccuuagaacuug

SEQ ID NO: 4255 - RNA, 19 nt, artificial
  Chemically Synthesized
ugagcaccagguuuagucu

SEQ ID NO: 4256 - RNA, 19 nt, artificial
  Chemically Synthesized
aagggauuuggugaaguca

SEQ ID NO: 4257 - RNA, 19 nt, artificial
  Chemically Synthesized
gucaguggcaaaagcuccu

SEQ ID NO: 4258 - RNA, 19 nt, artificial
  Chemically Synthesized
ucaguggcaaaagcuccuu

SEQ ID NO: 4259 - RNA, 19 nt, artificial
  Chemically Synthesized
gcaaaagcuccuuuugucg

SEQ ID NO: 4260 - RNA, 19 nt, artificial
  Chemically Synthesized
agaaagucaccuuccugua

SEQ ID NO: 4261 - RNA, 19 nt, artificial
  Chemically Synthesized
cugaagagaccuuagaacu

SEQ ID NO: 4262 - RNA, 19 nt, artificial
  Chemically Synthesized
gagaugacaaguuccggag

SEQ ID NO: 4263 - RNA, 19 nt, artificial
  Chemically Synthesized
agcagugguucaugucguc

SEQ ID NO: 4264 - RNA, 19 nt, artificial
  Chemically Synthesized
aguggcaaaagcuccuuuu

SEQ ID NO: 4265 - RNA, 19 nt, artificial
  Chemically Synthesized
gaugacgcgcuguaggauu

SEQ ID NO: 4266 - RNA, 19 nt, artificial
  Chemically Synthesized
cuuaaauugcaaacaggcu

SEQ ID NO: 4267 - RNA, 19 nt, artificial
  Chemically Synthesized
agaaugaggaagcgcugau

SEQ ID NO: 4268 - RNA, 19 nt, artificial
  Chemically Synthesized
gucaccuuccuguaaaaaa

SEQ ID NO: 4269 - RNA, 19 nt, artificial
  Chemically Synthesized
acagaaccuuucuccaagg

SEQ ID NO: 4270 - RNA, 19 nt, artificial
  Chemically Synthesized
gcauaguuuggagagcagc

SEQ ID NO: 4271 - RNA, 19 nt, artificial
  Chemically Synthesized
ccucuuuauucaaaauggc

SEQ ID NO: 4272 - RNA, 19 nt, artificial
  Chemically Synthesized
cuuucuccaaggagaccag

SEQ ID NO: 4273 - RNA, 19 nt, artificial
  Chemically Synthesized
uccugagcaccagguuuag

SEQ ID NO: 4274 - RNA, 19 nt, artificial
  Chemically Synthesized
cauuaacuuccagaauuug

SEQ ID NO: 4275 - RNA, 19 nt, artificial
  Chemically Synthesized
acuaccugcaggucgagaa

SEQ ID NO: 4276 - RNA, 19 nt, artificial
  Chemically Synthesized
gucgagaauguagucgaug

SEQ ID NO: 4277 - RNA, 19 nt, artificial
  Chemically Synthesized
gauuuccaccuggcuaagc

SEQ ID NO: 4278 - RNA, 19 nt, artificial
  Chemically Synthesized
cagugguucaugucgucca

SEQ ID NO: 4279 - RNA, 19 nt, artificial
  Chemically Synthesized
cagcaaggauuuaaaaauc

SEQ ID NO: 4280 - RNA, 19 nt, artificial
  Chemically Synthesized
aaccuuucuccaaggagac

SEQ ID NO: 4281 - RNA, 19 nt, artificial
  Chemically Synthesized
cuuggcauaguuuggagag

SEQ ID NO: 4282 - RNA, 19 nt, artificial
  Chemically Synthesized
cuuuugucguuggagauga

SEQ ID NO: 4283 - RNA, 19 nt, artificial
  Chemically Synthesized
gaugacaaguuccggagug

SEQ ID NO: 4284 - RNA, 19 nt, artificial
  Chemically Synthesized
gagaauguagucgaugacg

SEQ ID NO: 4285 - RNA, 19 nt, artificial
  Chemically Synthesized
gcggauucaaagaaugagg

SEQ ID NO: 4286 - RNA, 19 nt, artificial
  Chemically Synthesized
uccuuuugucguuggagau

SEQ ID NO: 4287 - RNA, 19 nt, artificial
  Chemically Synthesized
gaauguagucgaugacgcg

SEQ ID NO: 4288 - RNA, 19 nt, artificial
  Chemically Synthesized
ccaaaagaagucccgcuac

SEQ ID NO: 4289 - RNA, 19 nt, artificial
  Chemically Synthesized
cgcggauucaaagaaugag

SEQ ID NO: 4290 - RNA, 19 nt, artificial
  Chemically Synthesized
cauaaaucagggcaacaga

SEQ ID NO: 4291 - RNA, 19 nt, artificial
  Chemically Synthesized
agagaccuuagaacuuggg

SEQ ID NO: 4292 - RNA, 19 nt, artificial
  Chemically Synthesized
cuccuuuugucguuggaga

SEQ ID NO: 4293 - RNA, 19 nt, artificial
  Chemically Synthesized
gcaacagaaccuuucucca

SEQ ID NO: 4294 - RNA, 19 nt, artificial
  Chemically Synthesized
agcuagcucuggcucuuca

SEQ ID NO: 4295 - RNA, 19 nt, artificial
  Chemically Synthesized
aggucgagaauguagucga

SEQ ID NO: 4296 - RNA, 19 nt, artificial
  Chemically Synthesized
aggauuuccaccuggcuaa

SEQ ID NO: 4297 - RNA, 19 nt, artificial
  Chemically Synthesized
gaaggcacgccucuuuauu

SEQ ID NO: 4298 - RNA, 19 nt, artificial
  Chemically Synthesized
aggcacgccucuuuauuca

SEQ ID NO: 4299 - RNA, 19 nt, artificial
  Chemically Synthesized
ccagaucuuugagcuuccc

SEQ ID NO: 4300 - RNA, 19 nt, artificial
  Chemically Synthesized
gcauuguuacagaaaguca

SEQ ID NO: 4301 - RNA, 19 nt, artificial
  Chemically Synthesized
caggccacaaguucacagu

SEQ ID NO: 4302 - RNA, 19 nt, artificial
  Chemically Synthesized
agugguucaugucguccag

SEQ ID NO: 4303 - RNA, 19 nt, artificial
  Chemically Synthesized
aaccauuaacuuccagaau

SEQ ID NO: 4304 - RNA, 19 nt, artificial
  Chemically Synthesized
gucuccaggaagggauuug

SEQ ID NO: 4305 - RNA, 19 nt, artificial
  Chemically Synthesized
guggcaaaagcuccuuuug

SEQ ID NO: 4306 - RNA, 19 nt, artificial
  Chemically Synthesized
gcuguaggauuuccaccug

SEQ ID NO: 4307 - RNA, 19 nt, artificial
  Chemically Synthesized
gcccgcuuaaauugcaaac

SEQ ID NO: 4308 - RNA, 19 nt, artificial
  Chemically Synthesized
guaggauuuccaccuggcu

SEQ ID NO: 4309 - RNA, 19 nt, artificial
  Chemically Synthesized
uagucuccaggaagggauu

SEQ ID NO: 4310 - RNA, 19 nt, artificial
  Chemically Synthesized
caaaagaagucccgcuaca

SEQ ID NO: 4311 - RNA, 19 nt, artificial
  Chemically Synthesized
agggcaacagaaccuuucu

SEQ ID NO: 4312 - RNA, 19 nt, artificial
  Chemically Synthesized
ccuuggcauaguuuggaga

SEQ ID NO: 4313 - RNA, 19 nt, artificial
  Chemically Synthesized
gccacaaguucacaguccu

SEQ ID NO: 4314 - RNA, 19 nt, artificial
  Chemically Synthesized
gucguuggagaugacaagu

SEQ ID NO: 4315 - RNA, 19 nt, artificial
  Chemically Synthesized
gccgcggauucaaagaaug

SEQ ID NO: 4316 - RNA, 19 nt, artificial
  Chemically Synthesized
uccuguaaaaaagguacaa

SEQ ID NO: 4317 - RNA, 19 nt, artificial
  Chemically Synthesized
cacucaaaaccauuaacuu

SEQ ID NO: 4318 - RNA, 19 nt, artificial
  Chemically Synthesized
ccaggaagggauuugguga

SEQ ID NO: 4319 - RNA, 19 nt, artificial
  Chemically Synthesized
ccuuuugucguuggagaug

SEQ ID NO: 4320 - RNA, 19 nt, artificial
  Chemically Synthesized
accugcaggucgagaaugu

SEQ ID NO: 4321 - RNA, 19 nt, artificial
  Chemically Synthesized
agaagucccgcuacaguga

SEQ ID NO: 4322 - RNA, 19 nt, artificial
  Chemically Synthesized
caucgcauuguuacagaaa

SEQ ID NO: 4323 - RNA, 19 nt, artificial
  Chemically Synthesized
cuccaaggagaccagaaga

SEQ ID NO: 4324 - RNA, 19 nt, artificial
  Chemically Synthesized
agaugacaaguuccggagu

SEQ ID NO: 4325 - RNA, 19 nt, artificial
  Chemically Synthesized
gaauuugcuuuuuccuggc

SEQ ID NO: 4326 - RNA, 19 nt, artificial
  Chemically Synthesized
cacgccucuuuauucaaaa

SEQ ID NO: 4327 - RNA, 19 nt, artificial
  Chemically Synthesized
gauucaaagaaugaggaag

SEQ ID NO: 4328 - RNA, 19 nt, artificial
  Chemically Synthesized
caucauauacacaaguguu

SEQ ID NO: 4329 - RNA, 19 nt, artificial
  Chemically Synthesized
agucaccuuccuguaaaaa

SEQ ID NO: 4330 - RNA, 19 nt, artificial
  Chemically Synthesized
caccuuccuguaaaaaagg

SEQ ID NO: 4331 - RNA, 19 nt, artificial
  Chemically Synthesized
agaguucauaaaucagggc

SEQ ID NO: 4332 - RNA, 19 nt, artificial
  Chemically Synthesized
caccagguuuagucuccag

SEQ ID NO: 4333 - RNA, 19 nt, artificial
  Chemically Synthesized
gguuuagucuccaggaagg

SEQ ID NO: 4334 - RNA, 19 nt, artificial
  Chemically Synthesized
aggaagggauuuggugaag

SEQ ID NO: 4335 - RNA, 19 nt, artificial
  Chemically Synthesized
caaaagcuccuuuugucgu

SEQ ID NO: 4336 - RNA, 19 nt, artificial
  Chemically Synthesized
gcuccuuuugucguuggag

SEQ ID NO: 4337 - RNA, 19 nt, artificial
  Chemically Synthesized
ccgcuuaaauugcaaacag

SEQ ID NO: 4338 - RNA, 19 nt, artificial
  Chemically Synthesized
ccuuccuguaaaaaaggua

SEQ ID NO: 4339 - RNA, 19 nt, artificial
  Chemically Synthesized
caacagaaccuuucuccaa

SEQ ID NO: 4340 - RNA, 19 nt, artificial
  Chemically Synthesized
caaaaccauuaacuuccag

SEQ ID NO: 4341 - RNA, 19 nt, artificial
  Chemically Synthesized
cgcucugaagagaccuuag

SEQ ID NO: 4342 - RNA, 19 nt, artificial
  Chemically Synthesized
agagcuagcucuggcucuu

SEQ ID NO: 4343 - RNA, 19 nt, artificial
  Chemically Synthesized
ccacaaguucacaguccuu

SEQ ID NO: 4344 - RNA, 19 nt, artificial
  Chemically Synthesized
ccagguuuagucuccagga

SEQ ID NO: 4345 - RNA, 19 nt, artificial
  Chemically Synthesized
cuuccagaauuugcuuuuu

SEQ ID NO: 4346 - RNA, 19 nt, artificial
  Chemically Synthesized
gaguagcagugguucaugu

SEQ ID NO: 4347 - RNA, 19 nt, artificial
  Chemically Synthesized
ggucacuuauagagccugc

SEQ ID NO: 4348 - RNA, 19 nt, artificial
  Chemically Synthesized
agccgcggauucaaagaau

SEQ ID NO: 4349 - RNA, 19 nt, artificial
  Chemically Synthesized
gcaaggauuuaaaaaucac

SEQ ID NO: 4350 - RNA, 19 nt, artificial
  Chemically Synthesized
gaguucauaaaucagggca

SEQ ID NO: 4351 - RNA, 19 nt, artificial
  Chemically Synthesized
ggcaaaagcuccuuuuguc

SEQ ID NO: 4352 - RNA, 19 nt, artificial
  Chemically Synthesized
aauuugcuuuuuccuggca

SEQ ID NO: 4353 - RNA, 19 nt, artificial
  Chemically Synthesized
cguuggagaugacaaguuc

SEQ ID NO: 4354 - RNA, 19 nt, artificial
  Chemically Synthesized
cccgcuuaaauugcaaaca

SEQ ID NO: 4355 - RNA, 19 nt, artificial
  Chemically Synthesized
gaaccuuucuccaaggaga

SEQ ID NO: 4356 - RNA, 19 nt, artificial
  Chemically Synthesized
ccauuaacuuccagaauuu

SEQ ID NO: 4357 - RNA, 19 nt, artificial
  Chemically Synthesized
cuccaggaagggauuuggu

SEQ ID NO: 4358 - RNA, 19 nt, artificial
  Chemically Synthesized
acagcccgcuuaaauugca

SEQ ID NO: 4359 - RNA, 19 nt, artificial
  Chemically Synthesized
ccgcggauucaaagaauga

SEQ ID NO: 4360 - RNA, 19 nt, artificial
  Chemically Synthesized
cucugaagagaccuuagaa

SEQ ID NO: 4361 - RNA, 19 nt, artificial
  Chemically Synthesized
guuuagucuccaggaaggg

SEQ ID NO: 4362 - RNA, 19 nt, artificial
  Chemically Synthesized
ggagaugacaaguuccgga

SEQ ID NO: 4363 - RNA, 19 nt, artificial
  Chemically Synthesized
agcccgcuuaaauugcaaa

SEQ ID NO: 4364 - RNA, 19 nt, artificial
  Chemically Synthesized
gagucaguggcaaaagcuc

SEQ ID NO: 4365 - RNA, 19 nt, artificial
  Chemically Synthesized
ggaguagcagugguucaug

SEQ ID NO: 4366 - RNA, 19 nt, artificial
  Chemically Synthesized
cggucacuuauagagccug

SEQ ID NO: 4367 - RNA, 19 nt, artificial
  Chemically Synthesized
cgcuuaaauugcaaacagg

SEQ ID NO: 4368 - RNA, 19 nt, artificial
  Chemically Synthesized
aguucauaaaucagggcaa

SEQ ID NO: 4369 - RNA, 19 nt, artificial
  Chemically Synthesized
gagcaccagguuuagucuc

SEQ ID NO: 4370 - RNA, 19 nt, artificial
  Chemically Synthesized
acaucgcauuguuacagaa

SEQ ID NO: 4371 - RNA, 19 nt, artificial
  Chemically Synthesized
cacgcucugaagagaccuu

SEQ ID NO: 4372 - RNA, 19 nt, artificial
  Chemically Synthesized
caguggcaaaagcuccuuu

SEQ ID NO: 4373 - RNA, 19 nt, artificial
  Chemically Synthesized
gcaggucgagaauguaguc

SEQ ID NO: 4374 - RNA, 19 nt, artificial
  Chemically Synthesized
gggcaacagaaccuuucuc

SEQ ID NO: 4375 - RNA, 19 nt, artificial
  Chemically Synthesized
caggaagggauuuggugaa

SEQ ID NO: 4376 - RNA, 19 nt, artificial
  Chemically Synthesized
ggaagggauuuggugaagu

SEQ ID NO: 4377 - RNA, 19 nt, artificial
  Chemically Synthesized
ccagcaaggauuuaaaaau

SEQ ID NO: 4378 - RNA, 19 nt, artificial
  Chemically Synthesized
gggauuuggugaagucaag

SEQ ID NO: 4379 - RNA, 19 nt, artificial
  Chemically Synthesized
acgccucuuuauucaaaau

SEQ ID NO: 4380 - RNA, 19 nt, artificial
  Chemically Synthesized
cggauucaaagaaugagga

SEQ ID NO: 4381 - RNA, 19 nt, artificial
  Chemically Synthesized
gaaagucaccuuccuguaa

SEQ ID NO: 4382 - RNA, 19 nt, artificial
  Chemically Synthesized
accuuccuguaaaaaaggu

SEQ ID NO: 4383 - RNA, 19 nt, artificial
  Chemically Synthesized
ccugcaggucgagaaugua

SEQ ID NO: 4384 - RNA, 19 nt, artificial
  Chemically Synthesized
aagucaccuuccuguaaaa

SEQ ID NO: 4385 - RNA, 19 nt, artificial
  Chemically Synthesized
gguacaaaaccuauauacu

SEQ ID NO: 4386 - RNA, 19 nt, artificial
  Chemically Synthesized
cgccuuggcauaguuugga

SEQ ID NO: 4387 - RNA, 19 nt, artificial
  Chemically Synthesized
gaagggauuuggugaaguc

SEQ ID NO: 4388 - RNA, 19 nt, artificial
  Chemically Synthesized
ggauuuggugaagucaagu

SEQ ID NO: 4389 - RNA, 19 nt, artificial
  Chemically Synthesized
guucauaaaucagggcaac

SEQ ID NO: 4390 - RNA, 19 nt, artificial
  Chemically Synthesized
cgagucaguggcaaaagcu

SEQ ID NO: 4391 - RNA, 19 nt, artificial
  Chemically Synthesized
gguucaugucguccagcaa

SEQ ID NO: 4392 - RNA, 19 nt, artificial
  Chemically Synthesized
gcacgccucuuuauucaaa

SEQ ID NO: 4393 - RNA, 19 nt, artificial
  Chemically Synthesized
gcucugaagagaccuuaga

SEQ ID NO: 4394 - RNA, 19 nt, artificial
  Chemically Synthesized
cagcccgcuuaaauugcaa

SEQ ID NO: 4395 - RNA, 19 nt, artificial
  Chemically Synthesized
cgagaauguagucgaugac

SEQ ID NO: 4396 - RNA, 19 nt, artificial
  Chemically Synthesized
ggcauaguuuggagagcag

SEQ ID NO: 4397 - RNA, 19 nt, artificial
  Chemically Synthesized
ccugagcaccagguuuagu

SEQ ID NO: 4398 - RNA, 19 nt, artificial
  Chemically Synthesized
gcaccagguuuagucucca

SEQ ID NO: 4399 - RNA, 19 nt, artificial
  Chemically Synthesized
agucuccaggaagggauuu

SEQ ID NO: 4400 - RNA, 19 nt, artificial
  Chemically Synthesized
agcuccuuuugucguugga

SEQ ID NO: 4401 - RNA, 19 nt, artificial
  Chemically Synthesized
gaaugaggaagcgcugaua

SEQ ID NO: 4402 - RNA, 19 nt, artificial
  Chemically Synthesized
ccgccagcaaggauuuaaa

SEQ ID NO: 4403 - RNA, 19 nt, artificial
  Chemically Synthesized
cuaccugcaggucgagaau

SEQ ID NO: 4404 - RNA, 19 nt, artificial
  Chemically Synthesized
gccuuggcauaguuuggag

SEQ ID NO: 4405 - RNA, 19 nt, artificial
  Chemically Synthesized
ccuguaaaaaagguacaaa

SEQ ID NO: 4406 - RNA, 19 nt, artificial
  Chemically Synthesized
cagguuuagucuccaggaa

SEQ ID NO: 4407 - RNA, 19 nt, artificial
  Chemically Synthesized
gggaguagcagugguucau

SEQ ID NO: 4408 - RNA, 19 nt, artificial
  Chemically Synthesized
gccagcaaggauuuaaaaa

SEQ ID NO: 4409 - RNA, 19 nt, artificial
  Chemically Synthesized
gcggucacuuauagagccu

SEQ ID NO: 4410 - RNA, 19 nt, artificial
  Chemically Synthesized
gcucuucaggccacaaguu

SEQ ID NO: 4411 - RNA, 19 nt, artificial
  Chemically Synthesized
cguucacagcccgcuuaaa

SEQ ID NO: 4412 - RNA, 19 nt, artificial
  Chemically Synthesized
cagaaccuuucuccaagga

SEQ ID NO: 4413 - RNA, 19 nt, artificial
  Chemically Synthesized
ggauuuccaccuggcuaag

SEQ ID NO: 4414 - RNA, 19 nt, artificial
  Chemically Synthesized
gagccgcggauucaaagaa

SEQ ID NO: 4415 - RNA, 19 nt, artificial
  Chemically Synthesized
cuccgccagcaaggauuua

SEQ ID NO: 4416 - RNA, 19 nt, artificial
  Chemically Synthesized
cgccagcaaggauuuaaaa

SEQ ID NO: 4417 - RNA, 19 nt, artificial
  Chemically Synthesized
ggaaggcacgccucuuuau

SEQ ID NO: 4418 - RNA, 19 nt, artificial
  Chemically Synthesized
ggcacgccucuuuauucaa

SEQ ID NO: 4419 - RNA, 19 nt, artificial
  Chemically Synthesized
ggucgagaauguagucgau

SEQ ID NO: 4420 - RNA, 19 nt, artificial
  Chemically Synthesized
ggauucaaagaaugaggaa

SEQ ID NO: 4421 - RNA, 19 nt, artificial
  Chemically Synthesized
aaacaaaagagccaacaga

SEQ ID NO: 4422 - RNA, 19 nt, artificial
  Chemically Synthesized
ccgggagaaagaugucaaa

SEQ ID NO: 4423 - RNA, 19 nt, artificial
  Chemically Synthesized
ccauauugggccacuaaaa

SEQ ID NO: 4424 - RNA, 19 nt, artificial
  Chemically Synthesized
caaaacaaaagagccaaca

SEQ ID NO: 4425 - RNA, 19 nt, artificial
  Chemically Synthesized
ggugcuugggaguuuugaa

SEQ ID NO: 4426 - RNA, 19 nt, artificial
  Chemically Synthesized
gguggaccacgaagaguua

SEQ ID NO: 4427 - RNA, 19 nt, artificial
  Chemically Synthesized
aacaaaagagccaacagaa

SEQ ID NO: 4428 - RNA, 19 nt, artificial
  Chemically Synthesized
gcauguggcuuuuuuaaaa

SEQ ID NO: 4429 - RNA, 19 nt, artificial
  Chemically Synthesized
ccuguauaagcacugaaaa

SEQ ID NO: 4430 - RNA, 19 nt, artificial
  Chemically Synthesized
ccaacagaacagaagaaaa

SEQ ID NO: 4431 - RNA, 19 nt, artificial
  Chemically Synthesized
cgcauuugguggacccaaa

SEQ ID NO: 4432 - RNA, 19 nt, artificial
  Chemically Synthesized
aaaugaucugccucuaaaa

SEQ ID NO: 4433 - RNA, 19 nt, artificial
  Chemically Synthesized
cauauugggccacuaaaaa

SEQ ID NO: 4434 - RNA, 19 nt, artificial
  Chemically Synthesized
cgauuuucagaaucacaaa

SEQ ID NO: 4435 - RNA, 19 nt, artificial
  Chemically Synthesized
cuguauaagcacugaaaaa

SEQ ID NO: 4436 - RNA, 19 nt, artificial
  Chemically Synthesized
aaaacaaaagagccaacag

SEQ ID NO: 4437 - RNA, 19 nt, artificial
  Chemically Synthesized
ugggaguuuugaauguuaa

SEQ ID NO: 4438 - RNA, 19 nt, artificial
  Chemically Synthesized
cauugccuguguauggaaa

SEQ ID NO: 4439 - RNA, 19 nt, artificial
  Chemically Synthesized
ucaaaacaaaagagccaac

SEQ ID NO: 4440 - RNA, 19 nt, artificial
  Chemically Synthesized
gugugaaaaagaugccaau

SEQ ID NO: 4441 - RNA, 19 nt, artificial
  Chemically Synthesized
cauguuuugugcauuugua

SEQ ID NO: 4442 - RNA, 19 nt, artificial
  Chemically Synthesized
aagugaaauggauacuaca

SEQ ID NO: 4443 - RNA, 19 nt, artificial
  Chemically Synthesized
cccgggagaaagaugucaa

SEQ ID NO: 4444 - RNA, 19 nt, artificial
  Chemically Synthesized
cagaagacgucaaacguaa

SEQ ID NO: 4445 - RNA, 19 nt, artificial
  Chemically Synthesized
cuguguaaacacagucaaa

SEQ ID NO: 4446 - RNA, 19 nt, artificial
  Chemically Synthesized
aguuaauuacucagcagaa

SEQ ID NO: 4447 - RNA, 19 nt, artificial
  Chemically Synthesized
cguaaacagcucgaauuaa

SEQ ID NO: 4448 - RNA, 19 nt, artificial
  Chemically Synthesized
gccauauugggccacuaaa

SEQ ID NO: 4449 - RNA, 19 nt, artificial
  Chemically Synthesized
guaggauaagugaaaugga

SEQ ID NO: 4450 - RNA, 19 nt, artificial
  Chemically Synthesized
acuuguaggauaagugaaa

SEQ ID NO: 4451 - RNA, 19 nt, artificial
  Chemically Synthesized
caaugcgcaggaauaagga

SEQ ID NO: 4452 - RNA, 19 nt, artificial
  Chemically Synthesized
ggaauuucgauuuucagaa

SEQ ID NO: 4453 - RNA, 19 nt, artificial
  Chemically Synthesized
cauacugagccaaguauaa

SEQ ID NO: 4454 - RNA, 19 nt, artificial
  Chemically Synthesized
ugcuguguuggguagaaua

SEQ ID NO: 4455 - RNA, 19 nt, artificial
  Chemically Synthesized
cuuggagaagcacugcaga

SEQ ID NO: 4456 - RNA, 19 nt, artificial
  Chemically Synthesized
cgaggugcuugggaguuuu

SEQ ID NO: 4457 - RNA, 19 nt, artificial
  Chemically Synthesized
cugaaaaacaacaacacaa

SEQ ID NO: 4458 - RNA, 19 nt, artificial
  Chemically Synthesized
ccuuguuuaucagauacau

SEQ ID NO: 4459 - RNA, 19 nt, artificial
  Chemically Synthesized
auaauucuaaaucccucga

SEQ ID NO: 4460 - RNA, 19 nt, artificial
  Chemically Synthesized
ccuuuuauguagcacauaa

SEQ ID NO: 4461 - RNA, 19 nt, artificial
  Chemically Synthesized
agaagacgucaaacguaaa

SEQ ID NO: 4462 - RNA, 19 nt, artificial
  Chemically Synthesized
aguggaauuucgauuuuca

SEQ ID NO: 4463 - RNA, 19 nt, artificial
  Chemically Synthesized
gccaauuauuguuacacau

SEQ ID NO: 4464 - RNA, 19 nt, artificial
  Chemically Synthesized
gcugcauguggcuuuuuua

SEQ ID NO: 4465 - RNA, 19 nt, artificial
  Chemically Synthesized
guauaagcacugaaaaaca

SEQ ID NO: 4466 - RNA, 19 nt, artificial
  Chemically Synthesized
agacaauauacaagccaaa

SEQ ID NO: 4467 - RNA, 19 nt, artificial
  Chemically Synthesized
cucuguaaaaacacugaaa

SEQ ID NO: 4468 - RNA, 19 nt, artificial
  Chemically Synthesized
agagaaaagcacacuugua

SEQ ID NO: 4469 - RNA, 19 nt, artificial
  Chemically Synthesized
ggauguagcauuaugcaau

SEQ ID NO: 4470 - RNA, 19 nt, artificial
  Chemically Synthesized
uccuguauaagcacugaaa

SEQ ID NO: 4471 - RNA, 19 nt, artificial
  Chemically Synthesized
gcgcaaguggaauuucgau

SEQ ID NO: 4472 - RNA, 19 nt, artificial
  Chemically Synthesized
cgccauauugggccacuaa

SEQ ID NO: 4473 - RNA, 19 nt, artificial
  Chemically Synthesized
gggaguuuugaauguuaag

SEQ ID NO: 4474 - RNA, 19 nt, artificial
  Chemically Synthesized
agcgcaaguggaauuucga

SEQ ID NO: 4475 - RNA, 19 nt, artificial
  Chemically Synthesized
ucauguagagaaaagcaca

SEQ ID NO: 4476 - RNA, 19 nt, artificial
  Chemically Synthesized
aaauuugaacacuggcuaa

SEQ ID NO: 4477 - RNA, 19 nt, artificial
  Chemically Synthesized
cgguuuuguuuuuuugaga

SEQ ID NO: 4478 - RNA, 19 nt, artificial
  Chemically Synthesized
gagccaacagaacagaaga

SEQ ID NO: 4479 - RNA, 19 nt, artificial
  Chemically Synthesized
aggauaagugaaauggaua

SEQ ID NO: 4480 - RNA, 19 nt, artificial
  Chemically Synthesized
ggguuugaauuguuuucuu

SEQ ID NO: 4481 - RNA, 19 nt, artificial
  Chemically Synthesized
gcuucauuguacuaccugu

SEQ ID NO: 4482 - RNA, 19 nt, artificial
  Chemically Synthesized
gcaauuagguuuuuccuua

SEQ ID NO: 4483 - RNA, 19 nt, artificial
  Chemically Synthesized
aguggcaagagguggagaa

SEQ ID NO: 4484 - RNA, 19 nt, artificial
  Chemically Synthesized
gcauacugagccaaguaua

SEQ ID NO: 4485 - RNA, 19 nt, artificial
  Chemically Synthesized
uagacaauauacaagccaa

SEQ ID NO: 4486 - RNA, 19 nt, artificial
  Chemically Synthesized
uauugggccacuaaaaaaa

SEQ ID NO: 4487 - RNA, 19 nt, artificial
  Chemically Synthesized
aguuuauucucauuuggga

SEQ ID NO: 4488 - RNA, 19 nt, artificial
  Chemically Synthesized
cauuguacuaccuguguau

SEQ ID NO: 4489 - RNA, 19 nt, artificial
  Chemically Synthesized
ccuuauuugcuucauugua

SEQ ID NO: 4490 - RNA, 19 nt, artificial
  Chemically Synthesized
gcucgccaguccauuugau

SEQ ID NO: 4491 - RNA, 19 nt, artificial
  Chemically Synthesized
aguguaccuguguacauaa

SEQ ID NO: 4492 - RNA, 19 nt, artificial
  Chemically Synthesized
cccucgauauuuuuaaaga

SEQ ID NO: 4493 - RNA, 19 nt, artificial
  Chemically Synthesized
ugaccaucugcuuuuauua

SEQ ID NO: 4494 - RNA, 19 nt, artificial
  Chemically Synthesized
auauugggccacuaaaaaa

SEQ ID NO: 4495 - RNA, 19 nt, artificial
  Chemically Synthesized
cuguguacauaacucugua

SEQ ID NO: 4496 - RNA, 19 nt, artificial
  Chemically Synthesized
gaauguuaagaauugacca

SEQ ID NO: 4497 - RNA, 19 nt, artificial
  Chemically Synthesized
aacacuggcuaaagauaau

SEQ ID NO: 4498 - RNA, 19 nt, artificial
  Chemically Synthesized
gguuuuuccuuauuugcuu

SEQ ID NO: 4499 - RNA, 19 nt, artificial
  Chemically Synthesized
gcacugaaaaacaacaaca

SEQ ID NO: 4500 - RNA, 19 nt, artificial
  Chemically Synthesized
ggccucagaagacgucaaa

SEQ ID NO: 4501 - RNA, 19 nt, artificial
  Chemically Synthesized
acaaaagagccaacagaac

SEQ ID NO: 4502 - RNA, 19 nt, artificial
  Chemically Synthesized
ggguaugaagagcuugcuu

SEQ ID NO: 4503 - RNA, 19 nt, artificial
  Chemically Synthesized
aagagccaacagaacagaa

SEQ ID NO: 4504 - RNA, 19 nt, artificial
  Chemically Synthesized
gcauguuuugugcauuugu

SEQ ID NO: 4505 - RNA, 19 nt, artificial
  Chemically Synthesized
cucuguccauuuauccaca

SEQ ID NO: 4506 - RNA, 19 nt, artificial
  Chemically Synthesized
agaucuguaaguaacuuca

SEQ ID NO: 4507 - RNA, 19 nt, artificial
  Chemically Synthesized
ggcuguguaaacacaguca

SEQ ID NO: 4508 - RNA, 19 nt, artificial
  Chemically Synthesized
gauucuucuacucaaaaca

SEQ ID NO: 4509 - RNA, 19 nt, artificial
  Chemically Synthesized
acugcagagacauggaaga

SEQ ID NO: 4510 - RNA, 19 nt, artificial
  Chemically Synthesized
caguuaauuacucagcaga

SEQ ID NO: 4511 - RNA, 19 nt, artificial
  Chemically Synthesized
agauguaaugucccuuuca

SEQ ID NO: 4512 - RNA, 19 nt, artificial
  Chemically Synthesized
gauguagcauuaugcaauu

SEQ ID NO: 4513 - RNA, 19 nt, artificial
  Chemically Synthesized
acugaaaaacaacaacaca

SEQ ID NO: 4514 - RNA, 19 nt, artificial
  Chemically Synthesized
aaacguaaacagcucgaau

SEQ ID NO: 4515 - RNA, 19 nt, artificial
  Chemically Synthesized
acgauucuucuacucaaaa

SEQ ID NO: 4516 - RNA, 19 nt, artificial
  Chemically Synthesized
gcaaccgacgauucuucua

SEQ ID NO: 4517 - RNA, 19 nt, artificial
  Chemically Synthesized
aaugcgcaggaauaaggaa

SEQ ID NO: 4518 - RNA, 19 nt, artificial
  Chemically Synthesized
ugccaauuauuguuacaca

SEQ ID NO: 4519 - RNA, 19 nt, artificial
  Chemically Synthesized
gaugccaauuauuguuaca

SEQ ID NO: 4520 - RNA, 19 nt, artificial
  Chemically Synthesized
aaguguaccuguguacaua

SEQ ID NO: 4521 - RNA, 19 nt, artificial
  Chemically Synthesized
auucuaaaucccucgauau

SEQ ID NO: 4522 - RNA, 19 nt, artificial
  Chemically Synthesized
gcuguguaaacacagucaa

SEQ ID NO: 4523 - RNA, 19 nt, artificial
  Chemically Synthesized
cugcauguggcuuuuuuaa

SEQ ID NO: 4524 - RNA, 19 nt, artificial
  Chemically Synthesized
gagacagcugauacuucau

SEQ ID NO: 4525 - RNA, 19 nt, artificial
  Chemically Synthesized
cauccuguauaagcacuga

SEQ ID NO: 4526 - RNA, 19 nt, artificial
  Chemically Synthesized
cagauacaucacugcuuga

SEQ ID NO: 4527 - RNA, 19 nt, artificial
  Chemically Synthesized
gggucugugucuuuuggcu

SEQ ID NO: 4528 - RNA, 19 nt, artificial
  Chemically Synthesized
cucaaaacaaaagagccaa

SEQ ID NO: 4529 - RNA, 19 nt, artificial
  Chemically Synthesized
agcacugcagagacaugga

SEQ ID NO: 4530 - RNA, 19 nt, artificial
  Chemically Synthesized
aauaauucuaaaucccucg

SEQ ID NO: 4531 - RNA, 19 nt, artificial
  Chemically Synthesized
cgggcuguguaaacacagu

SEQ ID NO: 4532 - RNA, 19 nt, artificial
  Chemically Synthesized
uggugaucucccaagcuau

SEQ ID NO: 4533 - RNA, 19 nt, artificial
  Chemically Synthesized
agaucuggugaucucccaa

SEQ ID NO: 4534 - RNA, 19 nt, artificial
  Chemically Synthesized
gaaggguuugaauuguuuu

SEQ ID NO: 4535 - RNA, 19 nt, artificial
  Chemically Synthesized
cguuggauguagcauuaug

SEQ ID NO: 4536 - RNA, 19 nt, artificial
  Chemically Synthesized
aagcaaggaagauauacau

SEQ ID NO: 4537 - RNA, 19 nt, artificial
  Chemically Synthesized
uggccucagaagacgucaa

SEQ ID NO: 4538 - RNA, 19 nt, artificial
  Chemically Synthesized
auaaggaagcgaccugcaa

SEQ ID NO: 4539 - RNA, 19 nt, artificial
  Chemically Synthesized
gcuugcccgaguucuacua

SEQ ID NO: 4540 - RNA, 19 nt, artificial
  Chemically Synthesized
ccauuugaaguguaccugu

SEQ ID NO: 4541 - RNA, 19 nt, artificial
  Chemically Synthesized
gcuuacucuguccauuuau

SEQ ID NO: 4542 - RNA, 19 nt, artificial
  Chemically Synthesized
uugggaguuuugaauguua

SEQ ID NO: 4543 - RNA, 19 nt, artificial
  Chemically Synthesized
ugauuuacagcaaguagau

SEQ ID NO: 4544 - RNA, 19 nt, artificial
  Chemically Synthesized
cuuaaaugaucugccucua

SEQ ID NO: 4545 - RNA, 19 nt, artificial
  Chemically Synthesized
gcccgaguucuacuacaga

SEQ ID NO: 4546 - RNA, 19 nt, artificial
  Chemically Synthesized
guaaaugcuguguugggua

SEQ ID NO: 4547 - RNA, 19 nt, artificial
  Chemically Synthesized
cacuuguaggauaagugaa

SEQ ID NO: 4548 - RNA, 19 nt, artificial
  Chemically Synthesized
uggauguagcauuaugcaa

SEQ ID NO: 4549 - RNA, 19 nt, artificial
  Chemically Synthesized
uggaauuucgauuuucaga

SEQ ID NO: 4550 - RNA, 19 nt, artificial
  Chemically Synthesized
ugugugaaaaagaugccaa

SEQ ID NO: 4551 - RNA, 19 nt, artificial
  Chemically Synthesized
aaugcuguguuggguagaa

SEQ ID NO: 4552 - RNA, 19 nt, artificial
  Chemically Synthesized
guauggaaaaaccauuuga

SEQ ID NO: 4553 - RNA, 19 nt, artificial
  Chemically Synthesized
cuguguauggaaaaaccau

SEQ ID NO: 4554 - RNA, 19 nt, artificial
  Chemically Synthesized
ucauugccuguguauggaa

SEQ ID NO: 4555 - RNA, 19 nt, artificial
  Chemically Synthesized
cuuguaggauaagugaaau

SEQ ID NO: 4556 - RNA, 19 nt, artificial
  Chemically Synthesized
guucauguagagaaaagca

SEQ ID NO: 4557 - RNA, 19 nt, artificial
  Chemically Synthesized
cuaaaucccucgauauuuu

SEQ ID NO: 4558 - RNA, 19 nt, artificial
  Chemically Synthesized
guguaaacacagucaaaau

SEQ ID NO: 4559 - RNA, 19 nt, artificial
  Chemically Synthesized
gcuugggaguuuugaaugu

SEQ ID NO: 4560 - RNA, 19 nt, artificial
  Chemically Synthesized
gugcuugggaguuuugaau

SEQ ID NO: 4561 - RNA, 19 nt, artificial
  Chemically Synthesized
aggugcuugggaguuuuga

SEQ ID NO: 4562 - RNA, 19 nt, artificial
  Chemically Synthesized
cgcuuuguuuuguucgguu

SEQ ID NO: 4563 - RNA, 19 nt, artificial
  Chemically Synthesized
augaagcaaggaagauaua

SEQ ID NO: 4564 - RNA, 19 nt, artificial
  Chemically Synthesized
aaaagagccaacagaacag

SEQ ID NO: 4565 - RNA, 19 nt, artificial
  Chemically Synthesized
gcaggaauaaggaagcgac

SEQ ID NO: 4566 - RNA, 19 nt, artificial
  Chemically Synthesized
gugaaaaagaugccaauua

SEQ ID NO: 4567 - RNA, 19 nt, artificial
  Chemically Synthesized
uucacuucgggcuguguaa

SEQ ID NO: 4568 - RNA, 19 nt, artificial
  Chemically Synthesized
ggaguuuugaauguuaaga

SEQ ID NO: 4569 - RNA, 19 nt, artificial
  Chemically Synthesized
gauuuacagcaaguagaua

SEQ ID NO: 4570 - RNA, 19 nt, artificial
  Chemically Synthesized
aagcacugaaaaacaacaa

SEQ ID NO: 4571 - RNA, 19 nt, artificial
  Chemically Synthesized
cauuugguggacccaaaga

SEQ ID NO: 4572 - RNA, 19 nt, artificial
  Chemically Synthesized
auugccuguguauggaaaa

SEQ ID NO: 4573 - RNA, 19 nt, artificial
  Chemically Synthesized
guggaccacgaagaguuaa

SEQ ID NO: 4574 - RNA, 19 nt, artificial
  Chemically Synthesized
aauugaccaucugcuuuua

SEQ ID NO: 4575 - RNA, 19 nt, artificial
  Chemically Synthesized
agucucucuuaaaguugga

SEQ ID NO: 4576 - RNA, 19 nt, artificial
  Chemically Synthesized
acagcugauacuucauuua

SEQ ID NO: 4577 - RNA, 19 nt, artificial
  Chemically Synthesized
ucauuguacuaccugugua

SEQ ID NO: 4578 - RNA, 19 nt, artificial
  Chemically Synthesized
cauggaauggacauccugu

SEQ ID NO: 4579 - RNA, 19 nt, artificial
  Chemically Synthesized
cuugaugaagcaaggaaga

SEQ ID NO: 4580 - RNA, 19 nt, artificial
  Chemically Synthesized
gcucgaauuaagaauaugu

SEQ ID NO: 4581 - RNA, 19 nt, artificial
  Chemically Synthesized
aagaagccuggccucagaa

SEQ ID NO: 4582 - RNA, 19 nt, artificial
  Chemically Synthesized
uggcuaugcuuaaaagguu

SEQ ID NO: 4583 - RNA, 19 nt, artificial
  Chemically Synthesized
ccuguguauggaaaaacca

SEQ ID NO: 4584 - RNA, 19 nt, artificial
  Chemically Synthesized
agugaaauggauacuacau

SEQ ID NO: 4585 - RNA, 19 nt, artificial
  Chemically Synthesized
agaugucaaacgugcgagu

SEQ ID NO: 4586 - RNA, 19 nt, artificial
  Chemically Synthesized
aaaagcaacagaaaccuau

SEQ ID NO: 4587 - RNA, 19 nt, artificial
  Chemically Synthesized
uggcuaaagauaauugcua

SEQ ID NO: 4588 - RNA, 19 nt, artificial
  Chemically Synthesized
caugaagagaagcaauuuu

SEQ ID NO: 4589 - RNA, 19 nt, artificial
  Chemically Synthesized
gcuugaugaagcaaggaag

SEQ ID NO: 4590 - RNA, 19 nt, artificial
  Chemically Synthesized
agaagaaaauguuucagac

SEQ ID NO: 4591 - RNA, 19 nt, artificial
  Chemically Synthesized
gccaacagaacagaagaaa

SEQ ID NO: 4592 - RNA, 19 nt, artificial
  Chemically Synthesized
agccaacagaacagaagaa

SEQ ID NO: 4593 - RNA, 19 nt, artificial
  Chemically Synthesized
caaagacugauccgucgga

SEQ ID NO: 4594 - RNA, 19 nt, artificial
  Chemically Synthesized
cugaggacacgcauuuggu

SEQ ID NO: 4595 - RNA, 19 nt, artificial
  Chemically Synthesized
gguugcauacugagccaag

SEQ ID NO: 4596 - RNA, 19 nt, artificial
  Chemically Synthesized
aguuaacccgggacuugga

SEQ ID NO: 4597 - RNA, 19 nt, artificial
  Chemically Synthesized
ggauaagugaaauggauac

SEQ ID NO: 4598 - RNA, 19 nt, artificial
  Chemically Synthesized
aagguucauguagagaaaa

SEQ ID NO: 4599 - RNA, 19 nt, artificial
  Chemically Synthesized
gcaaaaauccgaggugcuu

SEQ ID NO: 4600 - RNA, 19 nt, artificial
  Chemically Synthesized
aaaaagcaacagaaaccua

SEQ ID NO: 4601 - RNA, 19 nt, artificial
  Chemically Synthesized
cauuugggagaucugguga

SEQ ID NO: 4602 - RNA, 19 nt, artificial
  Chemically Synthesized
uugacuugcaugaagagaa

SEQ ID NO: 4603 - RNA, 19 nt, artificial
  Chemically Synthesized
uguuuuuuugagagugcga

SEQ ID NO: 4604 - RNA, 19 nt, artificial
  Chemically Synthesized
gcauuaugcaauuagguuu

SEQ ID NO: 4605 - RNA, 19 nt, artificial
  Chemically Synthesized
ccugcaaccgacgauucuu

SEQ ID NO: 4606 - RNA, 19 nt, artificial
  Chemically Synthesized
ugguggacccaaagacuga

SEQ ID NO: 4607 - RNA, 19 nt, artificial
  Chemically Synthesized
guggaauuucgauuuucag

SEQ ID NO: 4608 - RNA, 19 nt, artificial
  Chemically Synthesized
ggcuaugcuuaaaagguug

SEQ ID NO: 4609 - RNA, 19 nt, artificial
  Chemically Synthesized
aagccaaaguggcauguuu

SEQ ID NO: 4610 - RNA, 19 nt, artificial
  Chemically Synthesized
uugccuguguauggaaaaa

SEQ ID NO: 4611 - RNA, 19 nt, artificial
  Chemically Synthesized
uucuaaaucccucgauauu

SEQ ID NO: 4612 - RNA, 19 nt, artificial
  Chemically Synthesized
ccaguuaauuacucagcag

SEQ ID NO: 4613 - RNA, 19 nt, artificial
  Chemically Synthesized
aucucccaagcuaucuaaa

SEQ ID NO: 4614 - RNA, 19 nt, artificial
  Chemically Synthesized
gcguuggauguagcauuau

SEQ ID NO: 4615 - RNA, 19 nt, artificial
  Chemically Synthesized
acaacaacacaauaacacu

SEQ ID NO: 4616 - RNA, 19 nt, artificial
  Chemically Synthesized
uaagcacugaaaaacaaca

SEQ ID NO: 4617 - RNA, 19 nt, artificial
  Chemically Synthesized
uaucgcugacuucauggaa

SEQ ID NO: 4618 - RNA, 19 nt, artificial
  Chemically Synthesized
agaaaauguuucagacggu

SEQ ID NO: 4619 - RNA, 19 nt, artificial
  Chemically Synthesized
acucaaaacaaaagagcca

SEQ ID NO: 4620 - RNA, 19 nt, artificial
  Chemically Synthesized
cgauucuucuacucaaaac

SEQ ID NO: 4621 - RNA, 19 nt, artificial
  Chemically Synthesized
cuaacucugaggacacgca

SEQ ID NO: 4622 - RNA, 19 nt, artificial
  Chemically Synthesized
gacuuggagaagcacugca

SEQ ID NO: 4623 - RNA, 19 nt, artificial
  Chemically Synthesized
uagagaaaagcacacuugu

SEQ ID NO: 4624 - RNA, 19 nt, artificial
  Chemically Synthesized
gagaucuggugaucuccca

SEQ ID NO: 4625 - RNA, 19 nt, artificial
  Chemically Synthesized
gcuuuguuuuguucgguuu

SEQ ID NO: 4626 - RNA, 19 nt, artificial
  Chemically Synthesized
uggacauccuguauaagca

SEQ ID NO: 4627 - RNA, 19 nt, artificial
  Chemically Synthesized
auggaauggacauccugua

SEQ ID NO: 4628 - RNA, 19 nt, artificial
  Chemically Synthesized
cugugucuuuuggcuccga

SEQ ID NO: 4629 - RNA, 19 nt, artificial
  Chemically Synthesized
caaacguaaacagcucgaa

SEQ ID NO: 4630 - RNA, 19 nt, artificial
  Chemically Synthesized
gaaaauguuucagacgguu

SEQ ID NO: 4631 - RNA, 19 nt, artificial
  Chemically Synthesized
cagaagaaaauguuucaga

SEQ ID NO: 4632 - RNA, 19 nt, artificial
  Chemically Synthesized
ccgacgauucuucuacuca

SEQ ID NO: 4633 - RNA, 19 nt, artificial
  Chemically Synthesized
gguggacccaaagacugau

SEQ ID NO: 4634 - RNA, 19 nt, artificial
  Chemically Synthesized
guugcauacugagccaagu

SEQ ID NO: 4635 - RNA, 19 nt, artificial
  Chemically Synthesized
uggagaagcacugcagaga

SEQ ID NO: 4636 - RNA, 19 nt, artificial
  Chemically Synthesized
ccauuuauccacaggaaag

SEQ ID NO: 4637 - RNA, 19 nt, artificial
  Chemically Synthesized
uccauuuauccacaggaaa

SEQ ID NO: 4638 - RNA, 19 nt, artificial
  Chemically Synthesized
ucagcagaauggugaucac

SEQ ID NO: 4639 - RNA, 19 nt, artificial
  Chemically Synthesized
guagcauuaugcaauuagg

SEQ ID NO: 4640 - RNA, 19 nt, artificial
  Chemically Synthesized
cacuaaaauuuuaggcacu

SEQ ID NO: 4641 - RNA, 19 nt, artificial
  Chemically Synthesized
ggacauccuguauaagcac

SEQ ID NO: 4642 - RNA, 19 nt, artificial
  Chemically Synthesized
aagacugauccgucggaca

SEQ ID NO: 4643 - RNA, 19 nt, artificial
  Chemically Synthesized
ucgauuuucagaaucacaa

SEQ ID NO: 4644 - RNA, 19 nt, artificial
  Chemically Synthesized
cgcaaguggaauuucgauu

SEQ ID NO: 4645 - RNA, 19 nt, artificial
  Chemically Synthesized
aaggaagguucauguagag

SEQ ID NO: 4646 - RNA, 19 nt, artificial
  Chemically Synthesized
uauccacaggaaaguguua

SEQ ID NO: 4647 - RNA, 19 nt, artificial
  Chemically Synthesized
acuucgggcuguguaaaca

SEQ ID NO: 4648 - RNA, 19 nt, artificial
  Chemically Synthesized
uuuuuuugagagugcgaga

SEQ ID NO: 4649 - RNA, 19 nt, artificial
  Chemically Synthesized
aaaagcguuggauguagca

SEQ ID NO: 4650 - RNA, 19 nt, artificial
  Chemically Synthesized
aagguugcauacugagcca

SEQ ID NO: 4651 - RNA, 19 nt, artificial
  Chemically Synthesized
uguuggguagaauagguuu

SEQ ID NO: 4652 - RNA, 19 nt, artificial
  Chemically Synthesized
uguguuggguagaauaggu

SEQ ID NO: 4653 - RNA, 19 nt, artificial
  Chemically Synthesized
acgaagaguuaacccggga

SEQ ID NO: 4654 - RNA, 19 nt, artificial
  Chemically Synthesized
acacuuguaggauaaguga

SEQ ID NO: 4655 - RNA, 19 nt, artificial
  Chemically Synthesized
uguguaaacacagucaaaa

SEQ ID NO: 4656 - RNA, 19 nt, artificial
  Chemically Synthesized
cucucuuaaaguuggaauu

SEQ ID NO: 4657 - RNA, 19 nt, artificial
  Chemically Synthesized
caacagaaaccuauccuca

SEQ ID NO: 4658 - RNA, 19 nt, artificial
  Chemically Synthesized
aguuuguuagauagcugca

SEQ ID NO: 4659 - RNA, 19 nt, artificial
  Chemically Synthesized
aaaauuugaacacuggcua

SEQ ID NO: 4660 - RNA, 19 nt, artificial
  Chemically Synthesized
aagagcuugcuuugauuua

SEQ ID NO: 4661 - RNA, 19 nt, artificial
  Chemically Synthesized
aagcguuggauguagcauu

SEQ ID NO: 4662 - RNA, 19 nt, artificial
  Chemically Synthesized
guuuccuuguuuaucagau

SEQ ID NO: 4663 - RNA, 19 nt, artificial
  Chemically Synthesized
gcauuugguggacccaaag

SEQ ID NO: 4664 - RNA, 19 nt, artificial
  Chemically Synthesized
cacugcagagacauggaag

SEQ ID NO: 4665 - RNA, 19 nt, artificial
  Chemically Synthesized
gaagcacugcagagacaug

SEQ ID NO: 4666 - RNA, 19 nt, artificial
  Chemically Synthesized
gugcauuuguaaaugcugu

SEQ ID NO: 4667 - RNA, 19 nt, artificial
  Chemically Synthesized
gaaguguaccuguguacau

SEQ ID NO: 4668 - RNA, 19 nt, artificial
  Chemically Synthesized
uuugaaguguaccugugua

SEQ ID NO: 4669 - RNA, 19 nt, artificial
  Chemically Synthesized
uaauucuaaaucccucgau

SEQ ID NO: 4670 - RNA, 19 nt, artificial
  Chemically Synthesized
uguuaagaauugaccaucu

SEQ ID NO: 4671 - RNA, 19 nt, artificial
  Chemically Synthesized
cagaauggugaucacucca

SEQ ID NO: 4672 - RNA, 19 nt, artificial
  Chemically Synthesized
aauuugaacacuggcuaaa

SEQ ID NO: 4673 - RNA, 19 nt, artificial
  Chemically Synthesized
cccuuucagagacagcuga

SEQ ID NO: 4674 - RNA, 19 nt, artificial
  Chemically Synthesized
auguaaugucccuuucaga

SEQ ID NO: 4675 - RNA, 19 nt, artificial
  Chemically Synthesized
ugacuucauggaauggaca

SEQ ID NO: 4676 - RNA, 19 nt, artificial
  Chemically Synthesized
aucgcugacuucauggaau

SEQ ID NO: 4677 - RNA, 19 nt, artificial
  Chemically Synthesized
gcuguguuggguagaauag

SEQ ID NO: 4678 - RNA, 19 nt, artificial
  Chemically Synthesized
gcacacuuguaggauaagu

SEQ ID NO: 4679 - RNA, 19 nt, artificial
  Chemically Synthesized
uguagagaaaagcacacuu

SEQ ID NO: 4680 - RNA, 19 nt, artificial
  Chemically Synthesized
aagaauugaccaucugcuu

SEQ ID NO: 4681 - RNA, 19 nt, artificial
  Chemically Synthesized
gucucucuuaaaguuggaa

SEQ ID NO: 4682 - RNA, 19 nt, artificial
  Chemically Synthesized
cuugcaugaagagaagcaa

SEQ ID NO: 4683 - RNA, 19 nt, artificial
  Chemically Synthesized
cucuaaaagcguuggaugu

SEQ ID NO: 4684 - RNA, 19 nt, artificial
  Chemically Synthesized
caaaugccgguucugugga

SEQ ID NO: 4685 - RNA, 19 nt, artificial
  Chemically Synthesized
uaacucugaggacacgcau

SEQ ID NO: 4686 - RNA, 19 nt, artificial
  Chemically Synthesized
cuagagggcaaguacgagu

SEQ ID NO: 4687 - RNA, 19 nt, artificial
  Chemically Synthesized
ucgccaguccauuugauca

SEQ ID NO: 4688 - RNA, 19 nt, artificial
  Chemically Synthesized
cagcgcaaguggaauuucg

SEQ ID NO: 4689 - RNA, 19 nt, artificial
  Chemically Synthesized
guguacauaacucuguaaa

SEQ ID NO: 4690 - RNA, 19 nt, artificial
  Chemically Synthesized
guguauggaaaaaccauuu

SEQ ID NO: 4691 - RNA, 19 nt, artificial
  Chemically Synthesized
aaccgacgauucuucuacu

SEQ ID NO: 4692 - RNA, 19 nt, artificial
  Chemically Synthesized
aguacgaguggcaagaggu

SEQ ID NO: 4693 - RNA, 19 nt, artificial
  Chemically Synthesized
cugagccaaguauaauuuu

SEQ ID NO: 4694 - RNA, 19 nt, artificial
  Chemically Synthesized
uggcauguuuugugcauuu

SEQ ID NO: 4695 - RNA, 19 nt, artificial
  Chemically Synthesized
aguggcauguuuugugcau

SEQ ID NO: 4696 - RNA, 19 nt, artificial
  Chemically Synthesized
acucuguaaaaacacugaa

SEQ ID NO: 4697 - RNA, 19 nt, artificial
  Chemically Synthesized
ggauacuacaucuuuaaac

SEQ ID NO: 4698 - RNA, 19 nt, artificial
  Chemically Synthesized
uggugaucacuccagguag

SEQ ID NO: 4699 - RNA, 19 nt, artificial
  Chemically Synthesized
aaagaugucaaacgugcga

SEQ ID NO: 4700 - RNA, 19 nt, artificial
  Chemically Synthesized
gggagaaagaugucaaacg

SEQ ID NO: 4701 - RNA, 19 nt, artificial
  Chemically Synthesized
guuuguuagauagcugcau

SEQ ID NO: 4702 - RNA, 19 nt, artificial
  Chemically Synthesized
cuggcuaaagauaauugcu

SEQ ID NO: 4703 - RNA, 19 nt, artificial
  Chemically Synthesized
ccucuaaaagcguuggaug

SEQ ID NO: 4704 - RNA, 19 nt, artificial
  Chemically Synthesized
cugacuucauggaauggac

SEQ ID NO: 4705 - RNA, 19 nt, artificial
  Chemically Synthesized
uacauaucgcugacuucau

SEQ ID NO: 4706 - RNA, 19 nt, artificial
  Chemically Synthesized
acgcauuugguggacccaa

SEQ ID NO: 4707 - RNA, 19 nt, artificial
  Chemically Synthesized
uaacccgggacuuggagaa

SEQ ID NO: 4708 - RNA, 19 nt, artificial
  Chemically Synthesized
gaaagaugucaaacgugcg

SEQ ID NO: 4709 - RNA, 19 nt, artificial
  Chemically Synthesized
agacccgggagaaagaugu

SEQ ID NO: 4710 - RNA, 19 nt, artificial
  Chemically Synthesized
cuuucagagacagcugaua

SEQ ID NO: 4711 - RNA, 19 nt, artificial
  Chemically Synthesized
uugauuuacagcaaguaga

SEQ ID NO: 4712 - RNA, 19 nt, artificial
  Chemically Synthesized
uuuaggcacucuuaaauga

SEQ ID NO: 4713 - RNA, 19 nt, artificial
  Chemically Synthesized
auccuguauaagcacugaa

SEQ ID NO: 4714 - RNA, 19 nt, artificial
  Chemically Synthesized
aauaaggaagcgaccugca

SEQ ID NO: 4715 - RNA, 19 nt, artificial
  Chemically Synthesized
aggacacgcauuuggugga

SEQ ID NO: 4716 - RNA, 19 nt, artificial
  Chemically Synthesized
aacucugaggacacgcauu

SEQ ID NO: 4717 - RNA, 19 nt, artificial
  Chemically Synthesized
auauggcuaugcuuaaaag

SEQ ID NO: 4718 - RNA, 19 nt, artificial
  Chemically Synthesized
guguuggguagaauagguu

SEQ ID NO: 4719 - RNA, 19 nt, artificial
  Chemically Synthesized
aacucuguaaaaacacuga

SEQ ID NO: 4720 - RNA, 19 nt, artificial
  Chemically Synthesized
agguucauguagagaaaag

SEQ ID NO: 4721 - RNA, 19 nt, artificial
  Chemically Synthesized
gaauggugaucacuccagg

SEQ ID NO: 4722 - RNA, 19 nt, artificial
  Chemically Synthesized
cagucucucuuaaaguugg

SEQ ID NO: 4723 - RNA, 19 nt, artificial
  Chemically Synthesized
ugaagagaagcaauuuugg

SEQ ID NO: 4724 - RNA, 19 nt, artificial
  Chemically Synthesized
cagaacagaagaaaauguu

SEQ ID NO: 4725 - RNA, 19 nt, artificial
  Chemically Synthesized
ccauuugaucagcggagac

SEQ ID NO: 4726 - RNA, 19 nt, artificial
  Chemically Synthesized
augcuguguuggguagaau

SEQ ID NO: 4727 - RNA, 19 nt, artificial
  Chemically Synthesized
ggcaaaaauccgaggugcu

SEQ ID NO: 4728 - RNA, 19 nt, artificial
  Chemically Synthesized
cucauuugggagaucuggu

SEQ ID NO: 4729 - RNA, 19 nt, artificial
  Chemically Synthesized
cacaaaaauuugaacacug

SEQ ID NO: 4730 - RNA, 19 nt, artificial
  Chemically Synthesized
gcuuugauuuacagcaagu

SEQ ID NO: 4731 - RNA, 19 nt, artificial
  Chemically Synthesized
acucuuaaaugaucugccu

SEQ ID NO: 4732 - RNA, 19 nt, artificial
  Chemically Synthesized
agagccaacagaacagaag

SEQ ID NO: 4733 - RNA, 19 nt, artificial
  Chemically Synthesized
aaagagccaacagaacaga

SEQ ID NO: 4734 - RNA, 19 nt, artificial
  Chemically Synthesized
agguugcauacugagccaa

SEQ ID NO: 4735 - RNA, 19 nt, artificial
  Chemically Synthesized
gcuuaaaagguugcauacu

SEQ ID NO: 4736 - RNA, 19 nt, artificial
  Chemically Synthesized
guuggguagaauagguuuu

SEQ ID NO: 4737 - RNA, 19 nt, artificial
  Chemically Synthesized
aguauuucauugccugugu

SEQ ID NO: 4738 - RNA, 19 nt, artificial
  Chemically Synthesized
gguucauguagagaaaagc

SEQ ID NO: 4739 - RNA, 19 nt, artificial
  Chemically Synthesized
cauuuauccacaggaaagu

SEQ ID NO: 4740 - RNA, 19 nt, artificial
  Chemically Synthesized
uacucuguccauuuaucca

SEQ ID NO: 4741 - RNA, 19 nt, artificial
  Chemically Synthesized
aucuguaaguaacuucaca

SEQ ID NO: 4742 - RNA, 19 nt, artificial
  Chemically Synthesized
aauggugaucacuccaggu

SEQ ID NO: 4743 - RNA, 19 nt, artificial
  Chemically Synthesized
cagcagaauggugaucacu

SEQ ID NO: 4744 - RNA, 19 nt, artificial
  Chemically Synthesized
accaguuaauuacucagca

SEQ ID NO: 4745 - RNA, 19 nt, artificial
  Chemically Synthesized
cgggagaaagaugucaaac

SEQ ID NO: 4746 - RNA, 19 nt, artificial
  Chemically Synthesized
ugaucucccaagcuaucua

SEQ ID NO: 4747 - RNA, 19 nt, artificial
  Chemically Synthesized
gcugacuucauggaaugga

SEQ ID NO: 4748 - RNA, 19 nt, artificial
  Chemically Synthesized
ggcgcuuuguuuuguucgg

SEQ ID NO: 4749 - RNA, 19 nt, artificial
  Chemically Synthesized
agacgucaaacguaaacag

SEQ ID NO: 4750 - RNA, 19 nt, artificial
  Chemically Synthesized
agaugccaauuauuguuac

SEQ ID NO: 4751 - RNA, 19 nt, artificial
  Chemically Synthesized
aaaugcuguguuggguaga

SEQ ID NO: 4752 - RNA, 19 nt, artificial
  Chemically Synthesized
guggcauguuuugugcauu

SEQ ID NO: 4753 - RNA, 19 nt, artificial
  Chemically Synthesized
ccaaaguggcauguuuugu

SEQ ID NO: 4754 - RNA, 19 nt, artificial
  Chemically Synthesized
cauuugaaguguaccugug

SEQ ID NO: 4755 - RNA, 19 nt, artificial
  Chemically Synthesized
gaaaaaccauuugaagugu

SEQ ID NO: 4756 - RNA, 19 nt, artificial
  Chemically Synthesized
aggaagguucauguagaga

SEQ ID NO: 4757 - RNA, 19 nt, artificial
  Chemically Synthesized
ucacuucgggcuguguaaa

SEQ ID NO: 4758 - RNA, 19 nt, artificial
  Chemically Synthesized
gagaaagaugucaaacgug

SEQ ID NO: 4759 - RNA, 19 nt, artificial
  Chemically Synthesized
cuuugauuuacagcaagua

SEQ ID NO: 4760 - RNA, 19 nt, artificial
  Chemically Synthesized
uugcuuugauuuacagcaa

SEQ ID NO: 4761 - RNA, 19 nt, artificial
  Chemically Synthesized
cuaaaagcguuggauguag

SEQ ID NO: 4762 - RNA, 19 nt, artificial
  Chemically Synthesized
gacuucauggaauggacau

SEQ ID NO: 4763 - RNA, 19 nt, artificial
  Chemically Synthesized
agagacauggaagaggcga

SEQ ID NO: 4764 - RNA, 19 nt, artificial
  Chemically Synthesized
caaaguggcauguuuugug

SEQ ID NO: 4765 - RNA, 19 nt, artificial
  Chemically Synthesized
agccaaaguggcauguuuu

SEQ ID NO: 4766 - RNA, 19 nt, artificial
  Chemically Synthesized
ugcauguggcuuuuuuaaa

SEQ ID NO: 4767 - RNA, 19 nt, artificial
  Chemically Synthesized
ucuaaaagcguuggaugua

SEQ ID NO: 4768 - RNA, 19 nt, artificial
  Chemically Synthesized
gccucuaaaagcguuggau

SEQ ID NO: 4769 - RNA, 19 nt, artificial
  Chemically Synthesized
aggcacucuuaaaugaucu

SEQ ID NO: 4770 - RNA, 19 nt, artificial
  Chemically Synthesized
gcgcuuuguuuuguucggu

SEQ ID NO: 4771 - RNA, 19 nt, artificial
  Chemically Synthesized
uacaucacugcuugaugaa

SEQ ID NO: 4772 - RNA, 19 nt, artificial
  Chemically Synthesized
auacaucacugcuugauga

SEQ ID NO: 4773 - RNA, 19 nt, artificial
  Chemically Synthesized
aacagcucgaauuaagaau

SEQ ID NO: 4774 - RNA, 19 nt, artificial
  Chemically Synthesized
cgcaggaauaaggaagcga

SEQ ID NO: 4775 - RNA, 19 nt, artificial
  Chemically Synthesized
aguccauuugaucagcgga

SEQ ID NO: 4776 - RNA, 19 nt, artificial
  Chemically Synthesized
cgccaguccauuugaucag

SEQ ID NO: 4777 - RNA, 19 nt, artificial
  Chemically Synthesized
uucgauuuucagaaucaca

SEQ ID NO: 4778 - RNA, 19 nt, artificial
  Chemically Synthesized
agaagcacugcagagacau

SEQ ID NO: 4779 - RNA, 19 nt, artificial
  Chemically Synthesized
uugcauacugagccaagua

SEQ ID NO: 4780 - RNA, 19 nt, artificial
  Chemically Synthesized
cauuuguaaaugcuguguu

SEQ ID NO: 4781 - RNA, 19 nt, artificial
  Chemically Synthesized
acuuggagaagcacugcag

SEQ ID NO: 4782 - RNA, 19 nt, artificial
  Chemically Synthesized
gacaauauacaagccaaag

SEQ ID NO: 4783 - RNA, 19 nt, artificial
  Chemically Synthesized
ggaaaaaccauuugaagug

SEQ ID NO: 4784 - RNA, 19 nt, artificial
  Chemically Synthesized
uguguauggaaaaaccauu

SEQ ID NO: 4785 - RNA, 19 nt, artificial
  Chemically Synthesized
gccuguguauggaaaaacc

SEQ ID NO: 4786 - RNA, 19 nt, artificial
  Chemically Synthesized
agaaaagcacacuuguagg

SEQ ID NO: 4787 - RNA, 19 nt, artificial
  Chemically Synthesized
cacaggaaaguguuauuuu

SEQ ID NO: 4788 - RNA, 19 nt, artificial
  Chemically Synthesized
uccacaggaaaguguuauu

SEQ ID NO: 4789 - RNA, 19 nt, artificial
  Chemically Synthesized
uugaccaucugcuuuuauu

SEQ ID NO: 4790 - RNA, 19 nt, artificial
  Chemically Synthesized
cuugggaguuuugaauguu

SEQ ID NO: 4791 - RNA, 19 nt, artificial
  Chemically Synthesized
uuuuugagagugcgagaga

SEQ ID NO: 4792 - RNA, 19 nt, artificial
  Chemically Synthesized
gaagagaagcaauuuuggg

SEQ ID NO: 4793 - RNA, 19 nt, artificial
  Chemically Synthesized
agcuugcuuugauuuacag

SEQ ID NO: 4794 - RNA, 19 nt, artificial
  Chemically Synthesized
guucgguuuuguuuuuuug

SEQ ID NO: 4795 - RNA, 19 nt, artificial
  Chemically Synthesized
aacguaaacagcucgaauu

SEQ ID NO: 4796 - RNA, 19 nt, artificial
  Chemically Synthesized
ucagaagacgucaaacgua

SEQ ID NO: 4797 - RNA, 19 nt, artificial
  Chemically Synthesized
accugcaaccgacgauucu

SEQ ID NO: 4798 - RNA, 19 nt, artificial
  Chemically Synthesized
agcuugcccgaguucuacu

SEQ ID NO: 4799 - RNA, 19 nt, artificial
  Chemically Synthesized
ucccuuccaccgccauauu

SEQ ID NO: 4800 - RNA, 19 nt, artificial
  Chemically Synthesized
ugugaaaaagaugccaauu

SEQ ID NO: 4801 - RNA, 19 nt, artificial
  Chemically Synthesized
augugugaaaaagaugcca

SEQ ID NO: 4802 - RNA, 19 nt, artificial
  Chemically Synthesized
cuuaaaagguugcauacug

SEQ ID NO: 4803 - RNA, 19 nt, artificial
  Chemically Synthesized
uguaaaugcuguguugggu

SEQ ID NO: 4804 - RNA, 19 nt, artificial
  Chemically Synthesized
acaauauacaagccaaagu

SEQ ID NO: 4805 - RNA, 19 nt, artificial
  Chemically Synthesized
gaagaguuaacccgggacu

SEQ ID NO: 4806 - RNA, 19 nt, artificial
  Chemically Synthesized
gaggugcuugggaguuuug

SEQ ID NO: 4807 - RNA, 19 nt, artificial
  Chemically Synthesized
gcagaauggugaucacucc

SEQ ID NO: 4808 - RNA, 19 nt, artificial
  Chemically Synthesized
agcugcauguggcuuuuuu

SEQ ID NO: 4809 - RNA, 19 nt, artificial
  Chemically Synthesized
acaaaaauuugaacacugg

SEQ ID NO: 4810 - RNA, 19 nt, artificial
  Chemically Synthesized
ccuuucagagacagcugau

SEQ ID NO: 4811 - RNA, 19 nt, artificial
  Chemically Synthesized
agagcuugcuuugauuuac

SEQ ID NO: 4812 - RNA, 19 nt, artificial
  Chemically Synthesized
gguuuuguuuuuuugagag

SEQ ID NO: 4813 - RNA, 19 nt, artificial
  Chemically Synthesized
uuguacuaccuguguauau

SEQ ID NO: 4814 - RNA, 19 nt, artificial
  Chemically Synthesized
uguuuuguucgguuuuguu

SEQ ID NO: 4815 - RNA, 19 nt, artificial
  Chemically Synthesized
uuaggcacucuuaaaugau

SEQ ID NO: 4816 - RNA, 19 nt, artificial
  Chemically Synthesized
guuuaucagauacaucacu

SEQ ID NO: 4817 - RNA, 19 nt, artificial
  Chemically Synthesized
uccuuguuuaucagauaca

SEQ ID NO: 4818 - RNA, 19 nt, artificial
  Chemically Synthesized
caguccauuugaucagcgg

SEQ ID NO: 4819 - RNA, 19 nt, artificial
  Chemically Synthesized
guaaugugugaaaaagaug

SEQ ID NO: 4820 - RNA, 19 nt, artificial
  Chemically Synthesized
augcuuaaaagguugcaua

SEQ ID NO: 4821 - RNA, 19 nt, artificial
  Chemically Synthesized
uauacaagccaaaguggca

SEQ ID NO: 4822 - RNA, 19 nt, artificial
  Chemically Synthesized
ugaaguguaccuguguaca

SEQ ID NO: 4823 - RNA, 19 nt, artificial
  Chemically Synthesized
cuuacucuguccauuuauc

SEQ ID NO: 4824 - RNA, 19 nt, artificial
  Chemically Synthesized
aaccuauccucacugcccu

SEQ ID NO: 4825 - RNA, 19 nt, artificial
  Chemically Synthesized
gcaacagaaaccuauccuc

SEQ ID NO: 4826 - RNA, 19 nt, artificial
  Chemically Synthesized
acccgggagaaagauguca

SEQ ID NO: 4827 - RNA, 19 nt, artificial
  Chemically Synthesized
caaaaauuugaacacuggc

SEQ ID NO: 4828 - RNA, 19 nt, artificial
  Chemically Synthesized
aaagauguaaugucccuuu

SEQ ID NO: 4829 - RNA, 19 nt, artificial
  Chemically Synthesized
auauuugacuugcaugaag

SEQ ID NO: 4830 - RNA, 19 nt, artificial
  Chemically Synthesized
uaugaagagcuugcuuuga

SEQ ID NO: 4831 - RNA, 19 nt, artificial
  Chemically Synthesized
cuaaaauuuuaggcacucu

SEQ ID NO: 4832 - RNA, 19 nt, artificial
  Chemically Synthesized
agcacugaaaaacaacaac

SEQ ID NO: 4833 - RNA, 19 nt, artificial
  Chemically Synthesized
uggaauggacauccuguau

SEQ ID NO: 4834 - RNA, 19 nt, artificial
  Chemically Synthesized
cucagaagacgucaaacgu

SEQ ID NO: 4835 - RNA, 19 nt, artificial
  Chemically Synthesized
uugcccgaguucuacuaca

SEQ ID NO: 4836 - RNA, 19 nt, artificial
  Chemically Synthesized
uaaaagguugcauacugag

SEQ ID NO: 4837 - RNA, 19 nt, artificial
  Chemically Synthesized
auuuguaaaugcuguguug

SEQ ID NO: 4838 - RNA, 19 nt, artificial
  Chemically Synthesized
auuugaaguguaccugugu

SEQ ID NO: 4839 - RNA, 19 nt, artificial
  Chemically Synthesized
uauuucauugccuguguau

SEQ ID NO: 4840 - RNA, 19 nt, artificial
  Chemically Synthesized
cuguaaguaacuucacauu

SEQ ID NO: 4841 - RNA, 19 nt, artificial
  Chemically Synthesized
ggugaucucccaagcuauc

SEQ ID NO: 4842 - RNA, 19 nt, artificial
  Chemically Synthesized
cuuuaaagauguaaugucc

SEQ ID NO: 4843 - RNA, 19 nt, artificial
  Chemically Synthesized
aucacugcuugaugaagca

SEQ ID NO: 4844 - RNA, 19 nt, artificial
  Chemically Synthesized
uguuuaucagauacaucac

SEQ ID NO: 4845 - RNA, 19 nt, artificial
  Chemically Synthesized
cgucaaacguaaacagcuc

SEQ ID NO: 4846 - RNA, 19 nt, artificial
  Chemically Synthesized
uaaggaagcgaccugcaac

SEQ ID NO: 4847 - RNA, 19 nt, artificial
  Chemically Synthesized
uguccauuuauccacagga

SEQ ID NO: 4848 - RNA, 19 nt, artificial
  Chemically Synthesized
auugggccacuaaaaaaag

SEQ ID NO: 4849 - RNA, 19 nt, artificial
  Chemically Synthesized
uaagaauugaccaucugcu

SEQ ID NO: 4850 - RNA, 19 nt, artificial
  Chemically Synthesized
guuagauagcugcaugugg

SEQ ID NO: 4851 - RNA, 19 nt, artificial
  Chemically Synthesized
cucccaagcuaucuaaagu

SEQ ID NO: 4852 - RNA, 19 nt, artificial
  Chemically Synthesized
auuugacuugcaugaagag

SEQ ID NO: 4853 - RNA, 19 nt, artificial
  Chemically Synthesized
uaccuuuuauguagcacau

SEQ ID NO: 4854 - RNA, 19 nt, artificial
  Chemically Synthesized
auuguacuaccuguguaua

SEQ ID NO: 4855 - RNA, 19 nt, artificial
  Chemically Synthesized
uagcauuaugcaauuaggu

SEQ ID NO: 4856 - RNA, 19 nt, artificial
  Chemically Synthesized
gaucugccucuaaaagcgu

SEQ ID NO: 4857 - RNA, 19 nt, artificial
  Chemically Synthesized
auacauaucgcugacuuca

SEQ ID NO: 4858 - RNA, 19 nt, artificial
  Chemically Synthesized
aaaugccgguucuguggag

SEQ ID NO: 4859 - RNA, 19 nt, artificial
  Chemically Synthesized
acucugaggacacgcauuu

SEQ ID NO: 4860 - RNA, 19 nt, artificial
  Chemically Synthesized
caaguacgaguggcaagag

SEQ ID NO: 4861 - RNA, 19 nt, artificial
  Chemically Synthesized
gauuuucagaaucacaaac

SEQ ID NO: 4862 - RNA, 19 nt, artificial
  Chemically Synthesized
uguguacauaacucuguaa

SEQ ID NO: 4863 - RNA, 19 nt, artificial
  Chemically Synthesized
aagaguuaacccgggacuu

SEQ ID NO: 4864 - RNA, 19 nt, artificial
  Chemically Synthesized
augucaaacgugcgagugu

SEQ ID NO: 4865 - RNA, 19 nt, artificial
  Chemically Synthesized
gaucacuccagguaguuug

SEQ ID NO: 4866 - RNA, 19 nt, artificial
  Chemically Synthesized
agaaagaugucaaacgugc

SEQ ID NO: 4867 - RNA, 19 nt, artificial
  Chemically Synthesized
auagcugcauguggcuuuu

SEQ ID NO: 4868 - RNA, 19 nt, artificial
  Chemically Synthesized
uuuugagagugcgagagag

SEQ ID NO: 4869 - RNA, 19 nt, artificial
  Chemically Synthesized
ggcacucuuaaaugaucug

SEQ ID NO: 4870 - RNA, 19 nt, artificial
  Chemically Synthesized
auaucgcugacuucaugga

SEQ ID NO: 4871 - RNA, 19 nt, artificial
  Chemically Synthesized
aaaaauacauaucgcugac

SEQ ID NO: 4872 - RNA, 19 nt, artificial
  Chemically Synthesized
ugcaaccgacgauucuucu

SEQ ID NO: 4873 - RNA, 19 nt, artificial
  Chemically Synthesized
caggaauaaggaagcgacc

SEQ ID NO: 4874 - RNA, 19 nt, artificial
  Chemically Synthesized
uacugagccaaguauaauu

SEQ ID NO: 4875 - RNA, 19 nt, artificial
  Chemically Synthesized
aaaaccauuugaaguguac

SEQ ID NO: 4876 - RNA, 19 nt, artificial
  Chemically Synthesized
aaacaguauuucauugccu

SEQ ID NO: 4877 - RNA, 19 nt, artificial
  Chemically Synthesized
uuauccacaggaaaguguu

SEQ ID NO: 4878 - RNA, 19 nt, artificial
  Chemically Synthesized
uucgggcuguguaaacaca

SEQ ID NO: 4879 - RNA, 19 nt, artificial
  Chemically Synthesized
caaaaauccgaggugcuug

SEQ ID NO: 4880 - RNA, 19 nt, artificial
  Chemically Synthesized
ucucucuuaaaguuggaau

SEQ ID NO: 4881 - RNA, 19 nt, artificial
  Chemically Synthesized
cuugcuuugauuuacagca

SEQ ID NO: 4882 - RNA, 19 nt, artificial
  Chemically Synthesized
uccuuauuugcuucauugu

SEQ ID NO: 4883 - RNA, 19 nt, artificial
  Chemically Synthesized
aaagcguuggauguagcau

SEQ ID NO: 4884 - RNA, 19 nt, artificial
  Chemically Synthesized
gacauccuguauaagcacu

SEQ ID NO: 4885 - RNA, 19 nt, artificial
  Chemically Synthesized
ugugucuuuuggcuccgag

SEQ ID NO: 4886 - RNA, 19 nt, artificial
  Chemically Synthesized
gaagaaaauguuucagacg

SEQ ID NO: 4887 - RNA, 19 nt, artificial
  Chemically Synthesized
uccauuugaucagcggaga

SEQ ID NO: 4888 - RNA, 19 nt, artificial
  Chemically Synthesized
cccgaguucuacuacagac

SEQ ID NO: 4889 - RNA, 19 nt, artificial
  Chemically Synthesized
acugagccaaguauaauuu

SEQ ID NO: 4890 - RNA, 19 nt, artificial
  Chemically Synthesized
accuguguacauaacucug

SEQ ID NO: 4891 - RNA, 19 nt, artificial
  Chemically Synthesized
guagagaaaagcacacuug

SEQ ID NO: 4892 - RNA, 19 nt, artificial
  Chemically Synthesized
uuuaaaggaagguucaugu

SEQ ID NO: 4893 - RNA, 19 nt, artificial
  Chemically Synthesized
ucuaaaucccucgauauuu

SEQ ID NO: 4894 - RNA, 19 nt, artificial
  Chemically Synthesized
uuucacuucgggcugugua

SEQ ID NO: 4895 - RNA, 19 nt, artificial
  Chemically Synthesized
aaguuggaauuuaccaguu

SEQ ID NO: 4896 - RNA, 19 nt, artificial
  Chemically Synthesized
accuuuuauguagcacaua

SEQ ID NO: 4897 - RNA, 19 nt, artificial
  Chemically Synthesized
guuuuguucgguuuuguuu

SEQ ID NO: 4898 - RNA, 19 nt, artificial
  Chemically Synthesized
agcucgaauuaagaauaug

SEQ ID NO: 4899 - RNA, 19 nt, artificial
  Chemically Synthesized
acgucaaacguaaacagcu

SEQ ID NO: 4900 - RNA, 19 nt, artificial
  Chemically Synthesized
cucugaggacacgcauuug

SEQ ID NO: 4901 - RNA, 19 nt, artificial
  Chemically Synthesized
gccaaaguggcauguuuug

SEQ ID NO: 4902 - RNA, 19 nt, artificial
  Chemically Synthesized
uuaacccgggacuuggaga

SEQ ID NO: 4903 - RNA, 19 nt, artificial
  Chemically Synthesized
uucauugccuguguaugga

SEQ ID NO: 4904 - RNA, 19 nt, artificial
  Chemically Synthesized
uggaccacgaagaguuaac

SEQ ID NO: 4905 - RNA, 19 nt, artificial
  Chemically Synthesized
aaaguuggaauuuaccagu

SEQ ID NO: 4906 - RNA, 19 nt, artificial
  Chemically Synthesized
uuguuagauagcugcaugu

SEQ ID NO: 4907 - RNA, 19 nt, artificial
  Chemically Synthesized
aaaguuuguuagauagcug

SEQ ID NO: 4908 - RNA, 19 nt, artificial
  Chemically Synthesized
uuggauguagcauuaugca

SEQ ID NO: 4909 - RNA, 19 nt, artificial
  Chemically Synthesized
ucauggaauggacauccug

SEQ ID NO: 4910 - RNA, 19 nt, artificial
  Chemically Synthesized
cuuguuuaucagauacauc

SEQ ID NO: 4911 - RNA, 19 nt, artificial
  Chemically Synthesized
aagacgucaaacguaaaca

SEQ ID NO: 4912 - RNA, 19 nt, artificial
  Chemically Synthesized
gaagacgucaaacguaaac

SEQ ID NO: 4913 - RNA, 19 nt, artificial
  Chemically Synthesized
caaccgacgauucuucuac

SEQ ID NO: 4914 - RNA, 19 nt, artificial
  Chemically Synthesized
aaguacgaguggcaagagg

SEQ ID NO: 4915 - RNA, 19 nt, artificial
  Chemically Synthesized
uggaaaaaccauuugaagu

SEQ ID NO: 4916 - RNA, 19 nt, artificial
  Chemically Synthesized
gauaagugaaauggauacu

SEQ ID NO: 4917 - RNA, 19 nt, artificial
  Chemically Synthesized
agcacacuuguaggauaag

SEQ ID NO: 4918 - RNA, 19 nt, artificial
  Chemically Synthesized
aaacgugcgagugucuaac

SEQ ID NO: 4919 - RNA, 19 nt, artificial
  Chemically Synthesized
uacucagcagaauggugau

SEQ ID NO: 4920 - RNA, 19 nt, artificial
  Chemically Synthesized
aaugaucugccucuaaaag

SEQ ID NO: 4921 - RNA, 19 nt, artificial
  Chemically Synthesized
ucuguuggcucuuuuguuu

SEQ ID NO: 4922 - RNA, 19 nt, artificial
  Chemically Synthesized
uuugacaucuuucucccgg

SEQ ID NO: 4923 - RNA, 19 nt, artificial
  Chemically Synthesized
uuuuaguggcccaauaugg

SEQ ID NO: 4924 - RNA, 19 nt, artificial
  Chemically Synthesized
uguuggcucuuuuguuuug

SEQ ID NO: 4925 - RNA, 19 nt, artificial
  Chemically Synthesized
uucaaaacucccaagcacc

SEQ ID NO: 4926 - RNA, 19 nt, artificial
  Chemically Synthesized
uaacucuucgugguccacc

SEQ ID NO: 4927 - RNA, 19 nt, artificial
  Chemically Synthesized
uucuguuggcucuuuuguu

SEQ ID NO: 4928 - RNA, 19 nt, artificial
  Chemically Synthesized
uuuuaaaaaagccacaugc

SEQ ID NO: 4929 - RNA, 19 nt, artificial
  Chemically Synthesized
uuuucagugcuuauacagg

SEQ ID NO: 4930 - RNA, 19 nt, artificial
  Chemically Synthesized
uuuucuucuguucuguugg

SEQ ID NO: 4931 - RNA, 19 nt, artificial
  Chemically Synthesized
uuuggguccaccaaaugcg

SEQ ID NO: 4932 - RNA, 19 nt, artificial
  Chemically Synthesized
uuuuagaggcagaucauuu

SEQ ID NO: 4933 - RNA, 19 nt, artificial
  Chemically Synthesized
uuuuuaguggcccaauaug

SEQ ID NO: 4934 - RNA, 19 nt, artificial
  Chemically Synthesized
uuugugauucugaaaaucg

SEQ ID NO: 4935 - RNA, 19 nt, artificial
  Chemically Synthesized
uuuuucagugcuuauacag

SEQ ID NO: 4936 - RNA, 19 nt, artificial
  Chemically Synthesized
cuguuggcucuuuuguuuu

SEQ ID NO: 4937 - RNA, 19 nt, artificial
  Chemically Synthesized
uuaacauucaaaacuccca

SEQ ID NO: 4938 - RNA, 19 nt, artificial
  Chemically Synthesized
uuuccauacacaggcaaug

SEQ ID NO: 4939 - RNA, 19 nt, artificial
  Chemically Synthesized
guuggcucuuuuguuuuga

SEQ ID NO: 4940 - RNA, 19 nt, artificial
  Chemically Synthesized
auuggcaucuuuuucacac

SEQ ID NO: 4941 - RNA, 19 nt, artificial
  Chemically Synthesized
uacaaaugcacaaaacaug

SEQ ID NO: 4942 - RNA, 19 nt, artificial
  Chemically Synthesized
uguaguauccauuucacuu

SEQ ID NO: 4943 - RNA, 19 nt, artificial
  Chemically Synthesized
uugacaucuuucucccggg

SEQ ID NO: 4944 - RNA, 19 nt, artificial
  Chemically Synthesized
uuacguuugacgucuucug

SEQ ID NO: 4945 - RNA, 19 nt, artificial
  Chemically Synthesized
uuugacuguguuuacacag

SEQ ID NO: 4946 - RNA, 19 nt, artificial
  Chemically Synthesized
uucugcugaguaauuaacu

SEQ ID NO: 4947 - RNA, 19 nt, artificial
  Chemically Synthesized
uuaauucgagcuguuuacg

SEQ ID NO: 4948 - RNA, 19 nt, artificial
  Chemically Synthesized
uuuaguggcccaauauggc

SEQ ID NO: 4949 - RNA, 19 nt, artificial
  Chemically Synthesized
uccauuucacuuauccuac

SEQ ID NO: 4950 - RNA, 19 nt, artificial
  Chemically Synthesized
uuucacuuauccuacaagu

SEQ ID NO: 4951 - RNA, 19 nt, artificial
  Chemically Synthesized
uccuuauuccugcgcauug

SEQ ID NO: 4952 - RNA, 19 nt, artificial
  Chemically Synthesized
uucugaaaaucgaaauucc

SEQ ID NO: 4953 - RNA, 19 nt, artificial
  Chemically Synthesized
uuauacuuggcucaguaug

SEQ ID NO: 4954 - RNA, 19 nt, artificial
  Chemically Synthesized
uauucuacccaacacagca

SEQ ID NO: 4955 - RNA, 19 nt, artificial
  Chemically Synthesized
ucugcagugcuucuccaag

SEQ ID NO: 4956 - RNA, 19 nt, artificial
  Chemically Synthesized
aaaacucccaagcaccucg

SEQ ID NO: 4957 - RNA, 19 nt, artificial
  Chemically Synthesized
uuguguuguuguuuuucag

SEQ ID NO: 4958 - RNA, 19 nt, artificial
  Chemically Synthesized
auguaucugauaaacaagg

SEQ ID NO: 4959 - RNA, 19 nt, artificial
  Chemically Synthesized
ucgagggauuuagaauuau

SEQ ID NO: 4960 - RNA, 19 nt, artificial
  Chemically Synthesized
uuaugugcuacauaaaagg

SEQ ID NO: 4961 - RNA, 19 nt, artificial
  Chemically Synthesized
uuuacguuugacgucuucu

SEQ ID NO: 4962 - RNA, 19 nt, artificial
  Chemically Synthesized
ugaaaaucgaaauuccacu

SEQ ID NO: 4963 - RNA, 19 nt, artificial
  Chemically Synthesized
auguguaacaauaauuggc

SEQ ID NO: 4964 - RNA, 19 nt, artificial
  Chemically Synthesized
uaaaaaagccacaugcagc

SEQ ID NO: 4965 - RNA, 19 nt, artificial
  Chemically Synthesized
uguuuuucagugcuuauac

SEQ ID NO: 4966 - RNA, 19 nt, artificial
  Chemically Synthesized
uuuggcuuguauauugucu

SEQ ID NO: 4967 - RNA, 19 nt, artificial
  Chemically Synthesized
uuucaguguuuuuacagag

SEQ ID NO: 4968 - RNA, 19 nt, artificial
  Chemically Synthesized
uacaagugugcuuuucucu

SEQ ID NO: 4969 - RNA, 19 nt, artificial
  Chemically Synthesized
auugcauaaugcuacaucc

SEQ ID NO: 4970 - RNA, 19 nt, artificial
  Chemically Synthesized
uuucagugcuuauacagga

SEQ ID NO: 4971 - RNA, 19 nt, artificial
  Chemically Synthesized
aucgaaauuccacuugcgc

SEQ ID NO: 4972 - RNA, 19 nt, artificial
  Chemically Synthesized
uuaguggcccaauauggcg

SEQ ID NO: 4973 - RNA, 19 nt, artificial
  Chemically Synthesized
cuuaacauucaaaacuccc

SEQ ID NO: 4974 - RNA, 19 nt, artificial
  Chemically Synthesized
ucgaaauuccacuugcgcu

SEQ ID NO: 4975 - RNA, 19 nt, artificial
  Chemically Synthesized
ugugcuuuucucuacauga

SEQ ID NO: 4976 - RNA, 19 nt, artificial
  Chemically Synthesized
uuagccaguguucaaauuu

SEQ ID NO: 4977 - RNA, 19 nt, artificial
  Chemically Synthesized
ucucaaaaaaacaaaaccg

SEQ ID NO: 4978 - RNA, 19 nt, artificial
  Chemically Synthesized
ucuucuguucuguuggcuc

SEQ ID NO: 4979 - RNA, 19 nt, artificial
  Chemically Synthesized
uauccauuucacuuauccu

SEQ ID NO: 4980 - RNA, 19 nt, artificial
  Chemically Synthesized
aagaaaacaauucaaaccc

SEQ ID NO: 4981 - RNA, 19 nt, artificial
  Chemically Synthesized
acagguaguacaaugaagc

SEQ ID NO: 4982 - RNA, 19 nt, artificial
  Chemically Synthesized
uaaggaaaaaccuaauugc

SEQ ID NO: 4983 - RNA, 19 nt, artificial
  Chemically Synthesized
uucuccaccucuugccacu

SEQ ID NO: 4984 - RNA, 19 nt, artificial
  Chemically Synthesized
uauacuuggcucaguaugc

SEQ ID NO: 4985 - RNA, 19 nt, artificial
  Chemically Synthesized
uuggcuuguauauugucua

SEQ ID NO: 4986 - RNA, 19 nt, artificial
  Chemically Synthesized
uuuuuuuaguggcccaaua

SEQ ID NO: 4987 - RNA, 19 nt, artificial
  Chemically Synthesized
ucccaaaugagaauaaacu

SEQ ID NO: 4988 - RNA, 19 nt, artificial
  Chemically Synthesized
auacacagguaguacaaug

SEQ ID NO: 4989 - RNA, 19 nt, artificial
  Chemically Synthesized
uacaaugaagcaaauaagg

SEQ ID NO: 4990 - RNA, 19 nt, artificial
  Chemically Synthesized
aucaaauggacuggcgagc

SEQ ID NO: 4991 - RNA, 19 nt, artificial
  Chemically Synthesized
uuauguacacagguacacu

SEQ ID NO: 4992 - RNA, 19 nt, artificial
  Chemically Synthesized
ucuuuaaaaauaucgaggg

SEQ ID NO: 4993 - RNA, 19 nt, artificial
  Chemically Synthesized
uaauaaaagcagaugguca

SEQ ID NO: 4994 - RNA, 19 nt, artificial
  Chemically Synthesized
uuuuuuaguggcccaauau

SEQ ID NO: 4995 - RNA, 19 nt, artificial
  Chemically Synthesized
uacagaguuauguacacag

SEQ ID NO: 4996 - RNA, 19 nt, artificial
  Chemically Synthesized
uggucaauucuuaacauuc

SEQ ID NO: 4997 - RNA, 19 nt, artificial
  Chemically Synthesized
auuaucuuuagccaguguu

SEQ ID NO: 4998 - RNA, 19 nt, artificial
  Chemically Synthesized
aagcaaauaaggaaaaacc

SEQ ID NO: 4999 - RNA, 19 nt, artificial
  Chemically Synthesized
uguuguuguuuuucagugc

SEQ ID NO: 5000 - RNA, 19 nt, artificial
  Chemically Synthesized
uuugacgucuucugaggcc

SEQ ID NO: 5001 - RNA, 19 nt, artificial
  Chemically Synthesized
guucuguuggcucuuuugu

SEQ ID NO: 5002 - RNA, 19 nt, artificial
  Chemically Synthesized
aagcaagcucuucauaccc

SEQ ID NO: 5003 - RNA, 19 nt, artificial
  Chemically Synthesized
uucuguucuguuggcucuu

SEQ ID NO: 5004 - RNA, 19 nt, artificial
  Chemically Synthesized
acaaaugcacaaaacaugc

SEQ ID NO: 5005 - RNA, 19 nt, artificial
  Chemically Synthesized
uguggauaaauggacagag

SEQ ID NO: 5006 - RNA, 19 nt, artificial
  Chemically Synthesized
ugaaguuacuuacagaucu

SEQ ID NO: 5007 - RNA, 19 nt, artificial
  Chemically Synthesized
ugacuguguuuacacagcc

SEQ ID NO: 5008 - RNA, 19 nt, artificial
  Chemically Synthesized
uguuuugaguagaagaauc

SEQ ID NO: 5009 - RNA, 19 nt, artificial
  Chemically Synthesized
ucuuccaugucucugcagu

SEQ ID NO: 5010 - RNA, 19 nt, artificial
  Chemically Synthesized
ucugcugaguaauuaacug

SEQ ID NO: 5011 - RNA, 19 nt, artificial
  Chemically Synthesized
ugaaagggacauuacaucu

SEQ ID NO: 5012 - RNA, 19 nt, artificial
  Chemically Synthesized
aauugcauaaugcuacauc

SEQ ID NO: 5013 - RNA, 19 nt, artificial
  Chemically Synthesized
uguguuguuguuuuucagu

SEQ ID NO: 5014 - RNA, 19 nt, artificial
  Chemically Synthesized
auucgagcuguuuacguuu

SEQ ID NO: 5015 - RNA, 19 nt, artificial
  Chemically Synthesized
uuuugaguagaagaaucgu

SEQ ID NO: 5016 - RNA, 19 nt, artificial
  Chemically Synthesized
uagaagaaucgucgguugc

SEQ ID NO: 5017 - RNA, 19 nt, artificial
  Chemically Synthesized
uuccuuauuccugcgcauu

SEQ ID NO: 5018 - RNA, 19 nt, artificial
  Chemically Synthesized
uguguaacaauaauuggca

SEQ ID NO: 5019 - RNA, 19 nt, artificial
  Chemically Synthesized
uguaacaauaauuggcauc

SEQ ID NO: 5020 - RNA, 19 nt, artificial
  Chemically Synthesized
uauguacacagguacacuu

SEQ ID NO: 5021 - RNA, 19 nt, artificial
  Chemically Synthesized
auaucgagggauuuagaau

SEQ ID NO: 5022 - RNA, 19 nt, artificial
  Chemically Synthesized
uugacuguguuuacacagc

SEQ ID NO: 5023 - RNA, 19 nt, artificial
  Chemically Synthesized
uuaaaaaagccacaugcag

SEQ ID NO: 5024 - RNA, 19 nt, artificial
  Chemically Synthesized
augaaguaucagcugucuc

SEQ ID NO: 5025 - RNA, 19 nt, artificial
  Chemically Synthesized
ucagugcuuauacaggaug

SEQ ID NO: 5026 - RNA, 19 nt, artificial
  Chemically Synthesized
ucaagcagugauguaucug

SEQ ID NO: 5027 - RNA, 19 nt, artificial
  Chemically Synthesized
agccaaaagacacagaccc

SEQ ID NO: 5028 - RNA, 19 nt, artificial
  Chemically Synthesized
uuggcucuuuuguuuugag

SEQ ID NO: 5029 - RNA, 19 nt, artificial
  Chemically Synthesized
uccaugucucugcagugcu

SEQ ID NO: 5030 - RNA, 19 nt, artificial
  Chemically Synthesized
cgagggauuuagaauuauu

SEQ ID NO: 5031 - RNA, 19 nt, artificial
  Chemically Synthesized
acuguguuuacacagcccg

SEQ ID NO: 5032 - RNA, 19 nt, artificial
  Chemically Synthesized
auagcuugggagaucacca

SEQ ID NO: 5033 - RNA, 19 nt, artificial
  Chemically Synthesized
uugggagaucaccagaucu

SEQ ID NO: 5034 - RNA, 19 nt, artificial
  Chemically Synthesized
aaaacaauucaaacccuuc

SEQ ID NO: 5035 - RNA, 19 nt, artificial
  Chemically Synthesized
cauaaugcuacauccaacg

SEQ ID NO: 5036 - RNA, 19 nt, artificial
  Chemically Synthesized
auguauaucuuccuugcuu

SEQ ID NO: 5037 - RNA, 19 nt, artificial
  Chemically Synthesized
uugacgucuucugaggcca

SEQ ID NO: 5038 - RNA, 19 nt, artificial
  Chemically Synthesized
uugcaggucgcuuccuuau

SEQ ID NO: 5039 - RNA, 19 nt, artificial
  Chemically Synthesized
uaguagaacucgggcaagc

SEQ ID NO: 5040 - RNA, 19 nt, artificial
  Chemically Synthesized
acagguacacuucaaaugg

SEQ ID NO: 5041 - RNA, 19 nt, artificial
  Chemically Synthesized
auaaauggacagaguaagc

SEQ ID NO: 5042 - RNA, 19 nt, artificial
  Chemically Synthesized
uaacauucaaaacucccaa

SEQ ID NO: 5043 - RNA, 19 nt, artificial
  Chemically Synthesized
aucuacuugcuguaaauca

SEQ ID NO: 5044 - RNA, 19 nt, artificial
  Chemically Synthesized
uagaggcagaucauuuaag

SEQ ID NO: 5045 - RNA, 19 nt, artificial
  Chemically Synthesized
ucuguaguagaacucgggc

SEQ ID NO: 5046 - RNA, 19 nt, artificial
  Chemically Synthesized
uacccaacacagcauuuac

SEQ ID NO: 5047 - RNA, 19 nt, artificial
  Chemically Synthesized
uucacuuauccuacaagug

SEQ ID NO: 5048 - RNA, 19 nt, artificial
  Chemically Synthesized
uugcauaaugcuacaucca

SEQ ID NO: 5049 - RNA, 19 nt, artificial
  Chemically Synthesized
ucugaaaaucgaaauucca

SEQ ID NO: 5050 - RNA, 19 nt, artificial
  Chemically Synthesized
uuggcaucuuuuucacaca

SEQ ID NO: 5051 - RNA, 19 nt, artificial
  Chemically Synthesized
uucuacccaacacagcauu

SEQ ID NO: 5052 - RNA, 19 nt, artificial
  Chemically Synthesized
ucaaaugguuuuuccauac

SEQ ID NO: 5053 - RNA, 19 nt, artificial
  Chemically Synthesized
augguuuuuccauacacag

SEQ ID NO: 5054 - RNA, 19 nt, artificial
  Chemically Synthesized
uuccauacacaggcaauga

SEQ ID NO: 5055 - RNA, 19 nt, artificial
  Chemically Synthesized
auuucacuuauccuacaag

SEQ ID NO: 5056 - RNA, 19 nt, artificial
  Chemically Synthesized
ugcuuuucucuacaugaac

SEQ ID NO: 5057 - RNA, 19 nt, artificial
  Chemically Synthesized
aaaauaucgagggauuuag

SEQ ID NO: 5058 - RNA, 19 nt, artificial
  Chemically Synthesized
auuuugacuguguuuacac

SEQ ID NO: 5059 - RNA, 19 nt, artificial
  Chemically Synthesized
acauucaaaacucccaagc

SEQ ID NO: 5060 - RNA, 19 nt, artificial
  Chemically Synthesized
auucaaaacucccaagcac

SEQ ID NO: 5061 - RNA, 19 nt, artificial
  Chemically Synthesized
ucaaaacucccaagcaccu

SEQ ID NO: 5062 - RNA, 19 nt, artificial
  Chemically Synthesized
aaccgaacaaaacaaagcg

SEQ ID NO: 5063 - RNA, 19 nt, artificial
  Chemically Synthesized
uauaucuuccuugcuucau

SEQ ID NO: 5064 - RNA, 19 nt, artificial
  Chemically Synthesized
cuguucuguuggcucuuuu

SEQ ID NO: 5065 - RNA, 19 nt, artificial
  Chemically Synthesized
gucgcuuccuuauuccugc

SEQ ID NO: 5066 - RNA, 19 nt, artificial
  Chemically Synthesized
uaauuggcaucuuuuucac

SEQ ID NO: 5067 - RNA, 19 nt, artificial
  Chemically Synthesized
uuacacagcccgaagugaa

SEQ ID NO: 5068 - RNA, 19 nt, artificial
  Chemically Synthesized
ucuuaacauucaaaacucc

SEQ ID NO: 5069 - RNA, 19 nt, artificial
  Chemically Synthesized
uaucuacuugcuguaaauc

SEQ ID NO: 5070 - RNA, 19 nt, artificial
  Chemically Synthesized
uuguuguuuuucagugcuu

SEQ ID NO: 5071 - RNA, 19 nt, artificial
  Chemically Synthesized
ucuuuggguccaccaaaug

SEQ ID NO: 5072 - RNA, 19 nt, artificial
  Chemically Synthesized
uuuuccauacacaggcaau

SEQ ID NO: 5073 - RNA, 19 nt, artificial
  Chemically Synthesized
uuaacucuucgugguccac

SEQ ID NO: 5074 - RNA, 19 nt, artificial
  Chemically Synthesized
uaaaagcagauggucaauu

SEQ ID NO: 5075 - RNA, 19 nt, artificial
  Chemically Synthesized
uccaacuuuaagagagacu

SEQ ID NO: 5076 - RNA, 19 nt, artificial
  Chemically Synthesized
uaaaugaaguaucagcugu

SEQ ID NO: 5077 - RNA, 19 nt, artificial
  Chemically Synthesized
uacacagguaguacaauga

SEQ ID NO: 5078 - RNA, 19 nt, artificial
  Chemically Synthesized
acaggauguccauuccaug

SEQ ID NO: 5079 - RNA, 19 nt, artificial
  Chemically Synthesized
ucuuccuugcuucaucaag

SEQ ID NO: 5080 - RNA, 19 nt, artificial
  Chemically Synthesized
acauauucuuaauucgagc

SEQ ID NO: 5081 - RNA, 19 nt, artificial
  Chemically Synthesized
uucugaggccaggcuucuu

SEQ ID NO: 5082 - RNA, 19 nt, artificial
  Chemically Synthesized
aaccuuuuaagcauagcca

SEQ ID NO: 5083 - RNA, 19 nt, artificial
  Chemically Synthesized
ugguuuuuccauacacagg

SEQ ID NO: 5084 - RNA, 19 nt, artificial
  Chemically Synthesized
auguaguauccauuucacu

SEQ ID NO: 5085 - RNA, 19 nt, artificial
  Chemically Synthesized
acucgcacguuugacaucu

SEQ ID NO: 5086 - RNA, 19 nt, artificial
  Chemically Synthesized
auagguuucuguugcuuuu

SEQ ID NO: 5087 - RNA, 19 nt, artificial
  Chemically Synthesized
uagcaauuaucuuuagcca

SEQ ID NO: 5088 - RNA, 19 nt, artificial
  Chemically Synthesized
aaaauugcuucucuucaug

SEQ ID NO: 5089 - RNA, 19 nt, artificial
  Chemically Synthesized
cuuccuugcuucaucaagc

SEQ ID NO: 5090 - RNA, 19 nt, artificial
  Chemically Synthesized
gucugaaacauuuucuucu

SEQ ID NO: 5091 - RNA, 19 nt, artificial
  Chemically Synthesized
uuucuucuguucuguuggc

SEQ ID NO: 5092 - RNA, 19 nt, artificial
  Chemically Synthesized
uucuucuguucuguuggcu

SEQ ID NO: 5093 - RNA, 19 nt, artificial
  Chemically Synthesized
uccgacggaucagucuuug

SEQ ID NO: 5094 - RNA, 19 nt, artificial
  Chemically Synthesized
accaaaugcguguccucag

SEQ ID NO: 5095 - RNA, 19 nt, artificial
  Chemically Synthesized
cuuggcucaguaugcaacc

SEQ ID NO: 5096 - RNA, 19 nt, artificial
  Chemically Synthesized
uccaagucccggguuaacu

SEQ ID NO: 5097 - RNA, 19 nt, artificial
  Chemically Synthesized
guauccauuucacuuaucc

SEQ ID NO: 5098 - RNA, 19 nt, artificial
  Chemically Synthesized
uuuucucuacaugaaccuu

SEQ ID NO: 5099 - RNA, 19 nt, artificial
  Chemically Synthesized
aagcaccucggauuuuugc

SEQ ID NO: 5100 - RNA, 19 nt, artificial
  Chemically Synthesized
uagguuucuguugcuuuuu

SEQ ID NO: 5101 - RNA, 19 nt, artificial
  Chemically Synthesized
ucaccagaucucccaaaug

SEQ ID NO: 5102 - RNA, 19 nt, artificial
  Chemically Synthesized
uucucuucaugcaagucaa

SEQ ID NO: 5103 - RNA, 19 nt, artificial
  Chemically Synthesized
ucgcacucucaaaaaaaca

SEQ ID NO: 5104 - RNA, 19 nt, artificial
  Chemically Synthesized
aaaccuaauugcauaaugc

SEQ ID NO: 5105 - RNA, 19 nt, artificial
  Chemically Synthesized
aagaaucgucgguugcagg

SEQ ID NO: 5106 - RNA, 19 nt, artificial
  Chemically Synthesized
ucagucuuuggguccacca

SEQ ID NO: 5107 - RNA, 19 nt, artificial
  Chemically Synthesized
cugaaaaucgaaauuccac

SEQ ID NO: 5108 - RNA, 19 nt, artificial
  Chemically Synthesized
caaccuuuuaagcauagcc

SEQ ID NO: 5109 - RNA, 19 nt, artificial
  Chemically Synthesized
aaacaugccacuuuggcuu

SEQ ID NO: 5110 - RNA, 19 nt, artificial
  Chemically Synthesized
uuuuuccauacacaggcaa

SEQ ID NO: 5111 - RNA, 19 nt, artificial
  Chemically Synthesized
aauaucgagggauuuagaa

SEQ ID NO: 5112 - RNA, 19 nt, artificial
  Chemically Synthesized
cugcugaguaauuaacugg

SEQ ID NO: 5113 - RNA, 19 nt, artificial
  Chemically Synthesized
uuuagauagcuugggagau

SEQ ID NO: 5114 - RNA, 19 nt, artificial
  Chemically Synthesized
auaaugcuacauccaacgc

SEQ ID NO: 5115 - RNA, 19 nt, artificial
  Chemically Synthesized
aguguuauuguguuguugu

SEQ ID NO: 5116 - RNA, 19 nt, artificial
  Chemically Synthesized
uguuguuuuucagugcuua

SEQ ID NO: 5117 - RNA, 19 nt, artificial
  Chemically Synthesized
uuccaugaagucagcgaua

SEQ ID NO: 5118 - RNA, 19 nt, artificial
  Chemically Synthesized
accgucugaaacauuuucu

SEQ ID NO: 5119 - RNA, 19 nt, artificial
  Chemically Synthesized
uggcucuuuuguuuugagu

SEQ ID NO: 5120 - RNA, 19 nt, artificial
  Chemically Synthesized
guuuugaguagaagaaucg

SEQ ID NO: 5121 - RNA, 19 nt, artificial
  Chemically Synthesized
ugcguguccucagaguuag

SEQ ID NO: 5122 - RNA, 19 nt, artificial
  Chemically Synthesized
ugcagugcuucuccaaguc

SEQ ID NO: 5123 - RNA, 19 nt, artificial
  Chemically Synthesized
acaagugugcuuuucucua

SEQ ID NO: 5124 - RNA, 19 nt, artificial
  Chemically Synthesized
ugggagaucaccagaucuc

SEQ ID NO: 5125 - RNA, 19 nt, artificial
  Chemically Synthesized
aaaccgaacaaaacaaagc

SEQ ID NO: 5126 - RNA, 19 nt, artificial
  Chemically Synthesized
ugcuuauacaggaugucca

SEQ ID NO: 5127 - RNA, 19 nt, artificial
  Chemically Synthesized
uacaggauguccauuccau

SEQ ID NO: 5128 - RNA, 19 nt, artificial
  Chemically Synthesized
ucggagccaaaagacacag

SEQ ID NO: 5129 - RNA, 19 nt, artificial
  Chemically Synthesized
uucgagcuguuuacguuug

SEQ ID NO: 5130 - RNA, 19 nt, artificial
  Chemically Synthesized
aaccgucugaaacauuuuc

SEQ ID NO: 5131 - RNA, 19 nt, artificial
  Chemically Synthesized
ucugaaacauuuucuucug

SEQ ID NO: 5132 - RNA, 19 nt, artificial
  Chemically Synthesized
ugaguagaagaaucgucgg

SEQ ID NO: 5133 - RNA, 19 nt, artificial
  Chemically Synthesized
aucagucuuuggguccacc

SEQ ID NO: 5134 - RNA, 19 nt, artificial
  Chemically Synthesized
acuuggcucaguaugcaac

SEQ ID NO: 5135 - RNA, 19 nt, artificial
  Chemically Synthesized
ucucugcagugcuucucca

SEQ ID NO: 5136 - RNA, 19 nt, artificial
  Chemically Synthesized
cuuuccuguggauaaaugg

SEQ ID NO: 5137 - RNA, 19 nt, artificial
  Chemically Synthesized
uuuccuguggauaaaugga

SEQ ID NO: 5138 - RNA, 19 nt, artificial
  Chemically Synthesized
gugaucaccauucugcuga

SEQ ID NO: 5139 - RNA, 19 nt, artificial
  Chemically Synthesized
ccuaauugcauaaugcuac

SEQ ID NO: 5140 - RNA, 19 nt, artificial
  Chemically Synthesized
agugccuaaaauuuuagug

SEQ ID NO: 5141 - RNA, 19 nt, artificial
  Chemically Synthesized
gugcuuauacaggaugucc

SEQ ID NO: 5142 - RNA, 19 nt, artificial
  Chemically Synthesized
uguccgacggaucagucuu

SEQ ID NO: 5143 - RNA, 19 nt, artificial
  Chemically Synthesized
uugugauucugaaaaucga

SEQ ID NO: 5144 - RNA, 19 nt, artificial
  Chemically Synthesized
aaucgaaauuccacuugcg

SEQ ID NO: 5145 - RNA, 19 nt, artificial
  Chemically Synthesized
cucuacaugaaccuuccuu

SEQ ID NO: 5146 - RNA, 19 nt, artificial
  Chemically Synthesized
uaacacuuuccuguggaua

SEQ ID NO: 5147 - RNA, 19 nt, artificial
  Chemically Synthesized
uguuuacacagcccgaagu

SEQ ID NO: 5148 - RNA, 19 nt, artificial
  Chemically Synthesized
ucucgcacucucaaaaaaa

SEQ ID NO: 5149 - RNA, 19 nt, artificial
  Chemically Synthesized
ugcuacauccaacgcuuuu

SEQ ID NO: 5150 - RNA, 19 nt, artificial
  Chemically Synthesized
uggcucaguaugcaaccuu

SEQ ID NO: 5151 - RNA, 19 nt, artificial
  Chemically Synthesized
aaaccuauucuacccaaca

SEQ ID NO: 5152 - RNA, 19 nt, artificial
  Chemically Synthesized
accuauucuacccaacaca

SEQ ID NO: 5153 - RNA, 19 nt, artificial
  Chemically Synthesized
ucccggguuaacucuucgu

SEQ ID NO: 5154 - RNA, 19 nt, artificial
  Chemically Synthesized
ucacuuauccuacaagugu

SEQ ID NO: 5155 - RNA, 19 nt, artificial
  Chemically Synthesized
uuuugacuguguuuacaca

SEQ ID NO: 5156 - RNA, 19 nt, artificial
  Chemically Synthesized
aauuccaacuuuaagagag

SEQ ID NO: 5157 - RNA, 19 nt, artificial
  Chemically Synthesized
ugaggauagguuucuguug

SEQ ID NO: 5158 - RNA, 19 nt, artificial
  Chemically Synthesized
ugcagcuaucuaacaaacu

SEQ ID NO: 5159 - RNA, 19 nt, artificial
  Chemically Synthesized
uagccaguguucaaauuuu

SEQ ID NO: 5160 - RNA, 19 nt, artificial
  Chemically Synthesized
uaaaucaaagcaagcucuu

SEQ ID NO: 5161 - RNA, 19 nt, artificial
  Chemically Synthesized
aaugcuacauccaacgcuu

SEQ ID NO: 5162 - RNA, 19 nt, artificial
  Chemically Synthesized
aucugauaaacaaggaaac

SEQ ID NO: 5163 - RNA, 19 nt, artificial
  Chemically Synthesized
cuuuggguccaccaaaugc

SEQ ID NO: 5164 - RNA, 19 nt, artificial
  Chemically Synthesized
cuuccaugucucugcagug

SEQ ID NO: 5165 - RNA, 19 nt, artificial
  Chemically Synthesized
caugucucugcagugcuuc

SEQ ID NO: 5166 - RNA, 19 nt, artificial
  Chemically Synthesized
acagcauuuacaaaugcac

SEQ ID NO: 5167 - RNA, 19 nt, artificial
  Chemically Synthesized
auguacacagguacacuuc

SEQ ID NO: 5168 - RNA, 19 nt, artificial
  Chemically Synthesized
uacacagguacacuucaaa

SEQ ID NO: 5169 - RNA, 19 nt, artificial
  Chemically Synthesized
aucgagggauuuagaauua

SEQ ID NO: 5170 - RNA, 19 nt, artificial
  Chemically Synthesized
agauggucaauucuuaaca

SEQ ID NO: 5171 - RNA, 19 nt, artificial
  Chemically Synthesized
uggagugaucaccauucug

SEQ ID NO: 5172 - RNA, 19 nt, artificial
  Chemically Synthesized
uuuagccaguguucaaauu

SEQ ID NO: 5173 - RNA, 19 nt, artificial
  Chemically Synthesized
ucagcugucucugaaaggg

SEQ ID NO: 5174 - RNA, 19 nt, artificial
  Chemically Synthesized
ucugaaagggacauuacau

SEQ ID NO: 5175 - RNA, 19 nt, artificial
  Chemically Synthesized
uguccauuccaugaaguca

SEQ ID NO: 5176 - RNA, 19 nt, artificial
  Chemically Synthesized
auuccaugaagucagcgau

SEQ ID NO: 5177 - RNA, 19 nt, artificial
  Chemically Synthesized
cuauucuacccaacacagc

SEQ ID NO: 5178 - RNA, 19 nt, artificial
  Chemically Synthesized
acuuauccuacaagugugc

SEQ ID NO: 5179 - RNA, 19 nt, artificial
  Chemically Synthesized
aagugugcuuuucucuaca

SEQ ID NO: 5180 - RNA, 19 nt, artificial
  Chemically Synthesized
aagcagauggucaauucuu

SEQ ID NO: 5181 - RNA, 19 nt, artificial
  Chemically Synthesized
uuccaacuuuaagagagac

SEQ ID NO: 5182 - RNA, 19 nt, artificial
  Chemically Synthesized
uugcuucucuucaugcaag

SEQ ID NO: 5183 - RNA, 19 nt, artificial
  Chemically Synthesized
acauccaacgcuuuuagag

SEQ ID NO: 5184 - RNA, 19 nt, artificial
  Chemically Synthesized
uccacagaaccggcauuug

SEQ ID NO: 5185 - RNA, 19 nt, artificial
  Chemically Synthesized
augcguguccucagaguua

SEQ ID NO: 5186 - RNA, 19 nt, artificial
  Chemically Synthesized
acucguacuugcccucuag

SEQ ID NO: 5187 - RNA, 19 nt, artificial
  Chemically Synthesized
ugaucaaauggacuggcga

SEQ ID NO: 5188 - RNA, 19 nt, artificial
  Chemically Synthesized
cgaaauuccacuugcgcug

SEQ ID NO: 5189 - RNA, 19 nt, artificial
  Chemically Synthesized
uuuacagaguuauguacac

SEQ ID NO: 5190 - RNA, 19 nt, artificial
  Chemically Synthesized
aaaugguuuuuccauacac

SEQ ID NO: 5191 - RNA, 19 nt, artificial
  Chemically Synthesized
aguagaagaaucgucgguu

SEQ ID NO: 5192 - RNA, 19 nt, artificial
  Chemically Synthesized
accucuugccacucguacu

SEQ ID NO: 5193 - RNA, 19 nt, artificial
  Chemically Synthesized
aaaauuauacuuggcucag

SEQ ID NO: 5194 - RNA, 19 nt, artificial
  Chemically Synthesized
aaaugcacaaaacaugcca

SEQ ID NO: 5195 - RNA, 19 nt, artificial
  Chemically Synthesized
augcacaaaacaugccacu

SEQ ID NO: 5196 - RNA, 19 nt, artificial
  Chemically Synthesized
uucaguguuuuuacagagu

SEQ ID NO: 5197 - RNA, 19 nt, artificial
  Chemically Synthesized
guuuaaagauguaguaucc

SEQ ID NO: 5198 - RNA, 19 nt, artificial
  Chemically Synthesized
cuaccuggagugaucacca

SEQ ID NO: 5199 - RNA, 19 nt, artificial
  Chemically Synthesized
ucgcacguuugacaucuuu

SEQ ID NO: 5200 - RNA, 19 nt, artificial
  Chemically Synthesized
cguuugacaucuuucuccc

SEQ ID NO: 5201 - RNA, 19 nt, artificial
  Chemically Synthesized
augcagcuaucuaacaaac

SEQ ID NO: 5202 - RNA, 19 nt, artificial
  Chemically Synthesized
agcaauuaucuuuagccag

SEQ ID NO: 5203 - RNA, 19 nt, artificial
  Chemically Synthesized
cauccaacgcuuuuagagg

SEQ ID NO: 5204 - RNA, 19 nt, artificial
  Chemically Synthesized
guccauuccaugaagucag

SEQ ID NO: 5205 - RNA, 19 nt, artificial
  Chemically Synthesized
augaagucagcgauaugua

SEQ ID NO: 5206 - RNA, 19 nt, artificial
  Chemically Synthesized
uuggguccaccaaaugcgu

SEQ ID NO: 5207 - RNA, 19 nt, artificial
  Chemically Synthesized
uucuccaagucccggguua

SEQ ID NO: 5208 - RNA, 19 nt, artificial
  Chemically Synthesized
cgcacguuugacaucuuuc

SEQ ID NO: 5209 - RNA, 19 nt, artificial
  Chemically Synthesized
acaucuuucucccgggucu

SEQ ID NO: 5210 - RNA, 19 nt, artificial
  Chemically Synthesized
uaucagcugucucugaaag

SEQ ID NO: 5211 - RNA, 19 nt, artificial
  Chemically Synthesized
ucuacuugcuguaaaucaa

SEQ ID NO: 5212 - RNA, 19 nt, artificial
  Chemically Synthesized
ucauuuaagagugccuaaa

SEQ ID NO: 5213 - RNA, 19 nt, artificial
  Chemically Synthesized
uucagugcuuauacaggau

SEQ ID NO: 5214 - RNA, 19 nt, artificial
  Chemically Synthesized
ugcaggucgcuuccuuauu

SEQ ID NO: 5215 - RNA, 19 nt, artificial
  Chemically Synthesized
uccaccaaaugcguguccu

SEQ ID NO: 5216 - RNA, 19 nt, artificial
  Chemically Synthesized
aaugcguguccucagaguu

SEQ ID NO: 5217 - RNA, 19 nt, artificial
  Chemically Synthesized
cuuuuaagcauagccauau

SEQ ID NO: 5218 - RNA, 19 nt, artificial
  Chemically Synthesized
aaccuauucuacccaacac

SEQ ID NO: 5219 - RNA, 19 nt, artificial
  Chemically Synthesized
ucaguguuuuuacagaguu

SEQ ID NO: 5220 - RNA, 19 nt, artificial
  Chemically Synthesized
cuuuucucuacaugaaccu

SEQ ID NO: 5221 - RNA, 19 nt, artificial
  Chemically Synthesized
ccuggagugaucaccauuc

SEQ ID NO: 5222 - RNA, 19 nt, artificial
  Chemically Synthesized
ccaacuuuaagagagacug

SEQ ID NO: 5223 - RNA, 19 nt, artificial
  Chemically Synthesized
ccaaaauugcuucucuuca

SEQ ID NO: 5224 - RNA, 19 nt, artificial
  Chemically Synthesized
aacauuuucuucuguucug

SEQ ID NO: 5225 - RNA, 19 nt, artificial
  Chemically Synthesized
gucuccgcugaucaaaugg

SEQ ID NO: 5226 - RNA, 19 nt, artificial
  Chemically Synthesized
auucuacccaacacagcau

SEQ ID NO: 5227 - RNA, 19 nt, artificial
  Chemically Synthesized
agcaccucggauuuuugcc

SEQ ID NO: 5228 - RNA, 19 nt, artificial
  Chemically Synthesized
accagaucucccaaaugag

SEQ ID NO: 5229 - RNA, 19 nt, artificial
  Chemically Synthesized
caguguucaaauuuuugug

SEQ ID NO: 5230 - RNA, 19 nt, artificial
  Chemically Synthesized
acuugcuguaaaucaaagc

SEQ ID NO: 5231 - RNA, 19 nt, artificial
  Chemically Synthesized
aggcagaucauuuaagagu

SEQ ID NO: 5232 - RNA, 19 nt, artificial
  Chemically Synthesized
cuucuguucuguuggcucu

SEQ ID NO: 5233 - RNA, 19 nt, artificial
  Chemically Synthesized
ucuguucuguuggcucuuu

SEQ ID NO: 5234 - RNA, 19 nt, artificial
  Chemically Synthesized
uuggcucaguaugcaaccu

SEQ ID NO: 5235 - RNA, 19 nt, artificial
  Chemically Synthesized
aguaugcaaccuuuuaagc

SEQ ID NO: 5236 - RNA, 19 nt, artificial
  Chemically Synthesized
aaaaccuauucuacccaac

SEQ ID NO: 5237 - RNA, 19 nt, artificial
  Chemically Synthesized
acacaggcaaugaaauacu

SEQ ID NO: 5238 - RNA, 19 nt, artificial
  Chemically Synthesized
gcuuuucucuacaugaacc

SEQ ID NO: 5239 - RNA, 19 nt, artificial
  Chemically Synthesized
acuuuccuguggauaaaug

SEQ ID NO: 5240 - RNA, 19 nt, artificial
  Chemically Synthesized
uggauaaauggacagagua

SEQ ID NO: 5241 - RNA, 19 nt, artificial
  Chemically Synthesized
ugugaaguuacuuacagau

SEQ ID NO: 5242 - RNA, 19 nt, artificial
  Chemically Synthesized
accuggagugaucaccauu

SEQ ID NO: 5243 - RNA, 19 nt, artificial
  Chemically Synthesized
agugaucaccauucugcug

SEQ ID NO: 5244 - RNA, 19 nt, artificial
  Chemically Synthesized
ugcugaguaauuaacuggu

SEQ ID NO: 5245 - RNA, 19 nt, artificial
  Chemically Synthesized
guuugacaucuuucucccg

SEQ ID NO: 5246 - RNA, 19 nt, artificial
  Chemically Synthesized
uagauagcuugggagauca

SEQ ID NO: 5247 - RNA, 19 nt, artificial
  Chemically Synthesized
uccauuccaugaagucagc

SEQ ID NO: 5248 - RNA, 19 nt, artificial
  Chemically Synthesized
ccgaacaaaacaaagcgcc

SEQ ID NO: 5249 - RNA, 19 nt, artificial
  Chemically Synthesized
cuguuuacguuugacgucu

SEQ ID NO: 5250 - RNA, 19 nt, artificial
  Chemically Synthesized
guaacaauaauuggcaucu

SEQ ID NO: 5251 - RNA, 19 nt, artificial
  Chemically Synthesized
ucuacccaacacagcauuu

SEQ ID NO: 5252 - RNA, 19 nt, artificial
  Chemically Synthesized
aaugcacaaaacaugccac

SEQ ID NO: 5253 - RNA, 19 nt, artificial
  Chemically Synthesized
acaaaacaugccacuuugg

SEQ ID NO: 5254 - RNA, 19 nt, artificial
  Chemically Synthesized
cacagguacacuucaaaug

SEQ ID NO: 5255 - RNA, 19 nt, artificial
  Chemically Synthesized
acacuucaaaugguuuuuc

SEQ ID NO: 5256 - RNA, 19 nt, artificial
  Chemically Synthesized
ucucuacaugaaccuuccu

SEQ ID NO: 5257 - RNA, 19 nt, artificial
  Chemically Synthesized
uuuacacagcccgaaguga

SEQ ID NO: 5258 - RNA, 19 nt, artificial
  Chemically Synthesized
cacguuugacaucuuucuc

SEQ ID NO: 5259 - RNA, 19 nt, artificial
  Chemically Synthesized
uacuugcuguaaaucaaag

SEQ ID NO: 5260 - RNA, 19 nt, artificial
  Chemically Synthesized
uugcuguaaaucaaagcaa

SEQ ID NO: 5261 - RNA, 19 nt, artificial
  Chemically Synthesized
cuacauccaacgcuuuuag

SEQ ID NO: 5262 - RNA, 19 nt, artificial
  Chemically Synthesized
auguccauuccaugaaguc

SEQ ID NO: 5263 - RNA, 19 nt, artificial
  Chemically Synthesized
ucgccucuuccaugucucu

SEQ ID NO: 5264 - RNA, 19 nt, artificial
  Chemically Synthesized
cacaaaacaugccacuuug

SEQ ID NO: 5265 - RNA, 19 nt, artificial
  Chemically Synthesized
aaaacaugccacuuuggcu

SEQ ID NO: 5266 - RNA, 19 nt, artificial
  Chemically Synthesized
uuuaaaaaagccacaugca

SEQ ID NO: 5267 - RNA, 19 nt, artificial
  Chemically Synthesized
uacauccaacgcuuuuaga

SEQ ID NO: 5268 - RNA, 19 nt, artificial
  Chemically Synthesized
auccaacgcuuuuagaggc

SEQ ID NO: 5269 - RNA, 19 nt, artificial
  Chemically Synthesized
agaucauuuaagagugccu

SEQ ID NO: 5270 - RNA, 19 nt, artificial
  Chemically Synthesized
accgaacaaaacaaagcgc

SEQ ID NO: 5271 - RNA, 19 nt, artificial
  Chemically Synthesized
uucaucaagcagugaugua

SEQ ID NO: 5272 - RNA, 19 nt, artificial
  Chemically Synthesized
ucaucaagcagugauguau

SEQ ID NO: 5273 - RNA, 19 nt, artificial
  Chemically Synthesized
auucuuaauucgagcuguu

SEQ ID NO: 5274 - RNA, 19 nt, artificial
  Chemically Synthesized
ucgcuuccuuauuccugcg

SEQ ID NO: 5275 - RNA, 19 nt, artificial
  Chemically Synthesized
uccgcugaucaaauggacu

SEQ ID NO: 5276 - RNA, 19 nt, artificial
  Chemically Synthesized
cugaucaaauggacuggcg

SEQ ID NO: 5277 - RNA, 19 nt, artificial
  Chemically Synthesized
ugugauucugaaaaucgaa

SEQ ID NO: 5278 - RNA, 19 nt, artificial
  Chemically Synthesized
augucucugcagugcuucu

SEQ ID NO: 5279 - RNA, 19 nt, artificial
  Chemically Synthesized
uacuuggcucaguaugcaa

SEQ ID NO: 5280 - RNA, 19 nt, artificial
  Chemically Synthesized
aacacagcauuuacaaaug

SEQ ID NO: 5281 - RNA, 19 nt, artificial
  Chemically Synthesized
cugcagugcuucuccaagu

SEQ ID NO: 5282 - RNA, 19 nt, artificial
  Chemically Synthesized
cuuuggcuuguauauuguc

SEQ ID NO: 5283 - RNA, 19 nt, artificial
  Chemically Synthesized
cacuucaaaugguuuuucc

SEQ ID NO: 5284 - RNA, 19 nt, artificial
  Chemically Synthesized
aaugguuuuuccauacaca

SEQ ID NO: 5285 - RNA, 19 nt, artificial
  Chemically Synthesized
gguuuuuccauacacaggc

SEQ ID NO: 5286 - RNA, 19 nt, artificial
  Chemically Synthesized
ccuacaagugugcuuuucu

SEQ ID NO: 5287 - RNA, 19 nt, artificial
  Chemically Synthesized
aaaauaacacuuuccugug

SEQ ID NO: 5288 - RNA, 19 nt, artificial
  Chemically Synthesized
aauaacacuuuccugugga

SEQ ID NO: 5289 - RNA, 19 nt, artificial
  Chemically Synthesized
aauaaaagcagauggucaa

SEQ ID NO: 5290 - RNA, 19 nt, artificial
  Chemically Synthesized
aacauucaaaacucccaag

SEQ ID NO: 5291 - RNA, 19 nt, artificial
  Chemically Synthesized
ucucucgcacucucaaaaa

SEQ ID NO: 5292 - RNA, 19 nt, artificial
  Chemically Synthesized
cccaaaauugcuucucuuc

SEQ ID NO: 5293 - RNA, 19 nt, artificial
  Chemically Synthesized
cuguaaaucaaagcaagcu

SEQ ID NO: 5294 - RNA, 19 nt, artificial
  Chemically Synthesized
caaaaaaacaaaaccgaac

SEQ ID NO: 5295 - RNA, 19 nt, artificial
  Chemically Synthesized
aauucgagcuguuuacguu

SEQ ID NO: 5296 - RNA, 19 nt, artificial
  Chemically Synthesized
uacguuugacgucuucuga

SEQ ID NO: 5297 - RNA, 19 nt, artificial
  Chemically Synthesized
agaaucgucgguugcaggu

SEQ ID NO: 5298 - RNA, 19 nt, artificial
  Chemically Synthesized
aguagaacucgggcaagcu

SEQ ID NO: 5299 - RNA, 19 nt, artificial
  Chemically Synthesized
aauauggcgguggaaggga

SEQ ID NO: 5300 - RNA, 19 nt, artificial
  Chemically Synthesized
aauuggcaucuuuuucaca

SEQ ID NO: 5301 - RNA, 19 nt, artificial
  Chemically Synthesized
uggcaucuuuuucacacau

SEQ ID NO: 5302 - RNA, 19 nt, artificial
  Chemically Synthesized
caguaugcaaccuuuuaag

SEQ ID NO: 5303 - RNA, 19 nt, artificial
  Chemically Synthesized
acccaacacagcauuuaca

SEQ ID NO: 5304 - RNA, 19 nt, artificial
  Chemically Synthesized
acuuuggcuuguauauugu

SEQ ID NO: 5305 - RNA, 19 nt, artificial
  Chemically Synthesized
agucccggguuaacucuuc

SEQ ID NO: 5306 - RNA, 19 nt, artificial
  Chemically Synthesized
caaaacucccaagcaccuc

SEQ ID NO: 5307 - RNA, 19 nt, artificial
  Chemically Synthesized
ggagugaucaccauucugc

SEQ ID NO: 5308 - RNA, 19 nt, artificial
  Chemically Synthesized
aaaaaagccacaugcagcu

SEQ ID NO: 5309 - RNA, 19 nt, artificial
  Chemically Synthesized
ccaguguucaaauuuuugu

SEQ ID NO: 5310 - RNA, 19 nt, artificial
  Chemically Synthesized
aucagcugucucugaaagg

SEQ ID NO: 5311 - RNA, 19 nt, artificial
  Chemically Synthesized
guaaaucaaagcaagcucu

SEQ ID NO: 5312 - RNA, 19 nt, artificial
  Chemically Synthesized
cucucaaaaaaacaaaacc

SEQ ID NO: 5313 - RNA, 19 nt, artificial
  Chemically Synthesized
auauacacagguaguacaa

SEQ ID NO: 5314 - RNA, 19 nt, artificial
  Chemically Synthesized
aacaaaaccgaacaaaaca

SEQ ID NO: 5315 - RNA, 19 nt, artificial
  Chemically Synthesized
aucauuuaagagugccuaa

SEQ ID NO: 5316 - RNA, 19 nt, artificial
  Chemically Synthesized
agugauguaucugauaaac

SEQ ID NO: 5317 - RNA, 19 nt, artificial
  Chemically Synthesized
uguaucugauaaacaagga

SEQ ID NO: 5318 - RNA, 19 nt, artificial
  Chemically Synthesized
ccgcugaucaaauggacug

SEQ ID NO: 5319 - RNA, 19 nt, artificial
  Chemically Synthesized
caucuuuuucacacauuac

SEQ ID NO: 5320 - RNA, 19 nt, artificial
  Chemically Synthesized
uaugcaaccuuuuaagcau

SEQ ID NO: 5321 - RNA, 19 nt, artificial
  Chemically Synthesized
ugccacuuuggcuuguaua

SEQ ID NO: 5322 - RNA, 19 nt, artificial
  Chemically Synthesized
uguacacagguacacuuca

SEQ ID NO: 5323 - RNA, 19 nt, artificial
  Chemically Synthesized
gauaaauggacagaguaag

SEQ ID NO: 5324 - RNA, 19 nt, artificial
  Chemically Synthesized
agggcagugaggauagguu

SEQ ID NO: 5325 - RNA, 19 nt, artificial
  Chemically Synthesized
gaggauagguuucuguugc

SEQ ID NO: 5326 - RNA, 19 nt, artificial
  Chemically Synthesized
ugacaucuuucucccgggu

SEQ ID NO: 5327 - RNA, 19 nt, artificial
  Chemically Synthesized
gccaguguucaaauuuuug

SEQ ID NO: 5328 - RNA, 19 nt, artificial
  Chemically Synthesized
aaagggacauuacaucuuu

SEQ ID NO: 5329 - RNA, 19 nt, artificial
  Chemically Synthesized
cuucaugcaagucaaauau

SEQ ID NO: 5330 - RNA, 19 nt, artificial
  Chemically Synthesized
ucaaagcaagcucuucaua

SEQ ID NO: 5331 - RNA, 19 nt, artificial
  Chemically Synthesized
agagugccuaaaauuuuag

SEQ ID NO: 5332 - RNA, 19 nt, artificial
  Chemically Synthesized
guuguuguuuuucagugcu

SEQ ID NO: 5333 - RNA, 19 nt, artificial
  Chemically Synthesized
auacaggauguccauucca

SEQ ID NO: 5334 - RNA, 19 nt, artificial
  Chemically Synthesized
acguuugacgucuucugag

SEQ ID NO: 5335 - RNA, 19 nt, artificial
  Chemically Synthesized
uguaguagaacucgggcaa

SEQ ID NO: 5336 - RNA, 19 nt, artificial
  Chemically Synthesized
cucaguaugcaaccuuuua

SEQ ID NO: 5337 - RNA, 19 nt, artificial
  Chemically Synthesized
caacacagcauuuacaaau

SEQ ID NO: 5338 - RNA, 19 nt, artificial
  Chemically Synthesized
acacagguacacuucaaau

SEQ ID NO: 5339 - RNA, 19 nt, artificial
  Chemically Synthesized
auacacaggcaaugaaaua

SEQ ID NO: 5340 - RNA, 19 nt, artificial
  Chemically Synthesized
aaugugaaguuacuuacag

SEQ ID NO: 5341 - RNA, 19 nt, artificial
  Chemically Synthesized
gauagcuugggagaucacc

SEQ ID NO: 5342 - RNA, 19 nt, artificial
  Chemically Synthesized
ggacauuacaucuuuaaag

SEQ ID NO: 5343 - RNA, 19 nt, artificial
  Chemically Synthesized
ugcuucaucaagcagugau

SEQ ID NO: 5344 - RNA, 19 nt, artificial
  Chemically Synthesized
gugauguaucugauaaaca

SEQ ID NO: 5345 - RNA, 19 nt, artificial
  Chemically Synthesized
gagcuguuuacguuugacg

SEQ ID NO: 5346 - RNA, 19 nt, artificial
  Chemically Synthesized
guugcaggucgcuuccuua

SEQ ID NO: 5347 - RNA, 19 nt, artificial
  Chemically Synthesized
uccuguggauaaauggaca

SEQ ID NO: 5348 - RNA, 19 nt, artificial
  Chemically Synthesized
cuuuuuuuaguggcccaau

SEQ ID NO: 5349 - RNA, 19 nt, artificial
  Chemically Synthesized
agcagauggucaauucuua

SEQ ID NO: 5350 - RNA, 19 nt, artificial
  Chemically Synthesized
ccacaugcagcuaucuaac

SEQ ID NO: 5351 - RNA, 19 nt, artificial
  Chemically Synthesized
acuuuagauagcuugggag

SEQ ID NO: 5352 - RNA, 19 nt, artificial
  Chemically Synthesized
cucuucaugcaagucaaau

SEQ ID NO: 5353 - RNA, 19 nt, artificial
  Chemically Synthesized
augugcuacauaaaaggua

SEQ ID NO: 5354 - RNA, 19 nt, artificial
  Chemically Synthesized
uauacacagguaguacaau

SEQ ID NO: 5355 - RNA, 19 nt, artificial
  Chemically Synthesized
accuaauugcauaaugcua

SEQ ID NO: 5356 - RNA, 19 nt, artificial
  Chemically Synthesized
acgcuuuuagaggcagauc

SEQ ID NO: 5357 - RNA, 19 nt, artificial
  Chemically Synthesized
ugaagucagcgauauguau

SEQ ID NO: 5358 - RNA, 19 nt, artificial
  Chemically Synthesized
cuccacagaaccggcauuu

SEQ ID NO: 5359 - RNA, 19 nt, artificial
  Chemically Synthesized
aaaugcguguccucagagu

SEQ ID NO: 5360 - RNA, 19 nt, artificial
  Chemically Synthesized
cucuugccacucguacuug

SEQ ID NO: 5361 - RNA, 19 nt, artificial
  Chemically Synthesized
guuugugauucugaaaauc

SEQ ID NO: 5362 - RNA, 19 nt, artificial
  Chemically Synthesized
uuacagaguuauguacaca

SEQ ID NO: 5363 - RNA, 19 nt, artificial
  Chemically Synthesized
aagucccggguuaacucuu

SEQ ID NO: 5364 - RNA, 19 nt, artificial
  Chemically Synthesized
acacucgcacguuugacau

SEQ ID NO: 5365 - RNA, 19 nt, artificial
  Chemically Synthesized
caaacuaccuggagugauc

SEQ ID NO: 5366 - RNA, 19 nt, artificial
  Chemically Synthesized
gcacguuugacaucuuucu

SEQ ID NO: 5367 - RNA, 19 nt, artificial
  Chemically Synthesized
aaaagccacaugcagcuau

SEQ ID NO: 5368 - RNA, 19 nt, artificial
  Chemically Synthesized
cucucucgcacucucaaaa

SEQ ID NO: 5369 - RNA, 19 nt, artificial
  Chemically Synthesized
cagaucauuuaagagugcc

SEQ ID NO: 5370 - RNA, 19 nt, artificial
  Chemically Synthesized
uccaugaagucagcgauau

SEQ ID NO: 5371 - RNA, 19 nt, artificial
  Chemically Synthesized
gucagcgauauguauuuuu

SEQ ID NO: 5372 - RNA, 19 nt, artificial
  Chemically Synthesized
agaagaaucgucgguugca

SEQ ID NO: 5373 - RNA, 19 nt, artificial
  Chemically Synthesized
ggucgcuuccuuauuccug

SEQ ID NO: 5374 - RNA, 19 nt, artificial
  Chemically Synthesized
aauuauacuuggcucagua

SEQ ID NO: 5375 - RNA, 19 nt, artificial
  Chemically Synthesized
guacacuucaaaugguuuu

SEQ ID NO: 5376 - RNA, 19 nt, artificial
  Chemically Synthesized
aggcaaugaaauacuguuu

SEQ ID NO: 5377 - RNA, 19 nt, artificial
  Chemically Synthesized
aacacuuuccuguggauaa

SEQ ID NO: 5378 - RNA, 19 nt, artificial
  Chemically Synthesized
uguguuuacacagcccgaa

SEQ ID NO: 5379 - RNA, 19 nt, artificial
  Chemically Synthesized
caagcaccucggauuuuug

SEQ ID NO: 5380 - RNA, 19 nt, artificial
  Chemically Synthesized
auuccaacuuuaagagaga

SEQ ID NO: 5381 - RNA, 19 nt, artificial
  Chemically Synthesized
ugcuguaaaucaaagcaag

SEQ ID NO: 5382 - RNA, 19 nt, artificial
  Chemically Synthesized
acaaugaagcaaauaagga

SEQ ID NO: 5383 - RNA, 19 nt, artificial
  Chemically Synthesized
augcuacauccaacgcuuu

SEQ ID NO: 5384 - RNA, 19 nt, artificial
  Chemically Synthesized
agugcuuauacaggauguc

SEQ ID NO: 5385 - RNA, 19 nt, artificial
  Chemically Synthesized
cucggagccaaaagacaca

SEQ ID NO: 5386 - RNA, 19 nt, artificial
  Chemically Synthesized
cgucugaaacauuuucuuc

SEQ ID NO: 5387 - RNA, 19 nt, artificial
  Chemically Synthesized
ucuccgcugaucaaaugga

SEQ ID NO: 5388 - RNA, 19 nt, artificial
  Chemically Synthesized
gucuguaguagaacucggg

SEQ ID NO: 5389 - RNA, 19 nt, artificial
  Chemically Synthesized
aaauuauacuuggcucagu

SEQ ID NO: 5390 - RNA, 19 nt, artificial
  Chemically Synthesized
cagaguuauguacacaggu

SEQ ID NO: 5391 - RNA, 19 nt, artificial
  Chemically Synthesized
caagugugcuuuucucuac

SEQ ID NO: 5392 - RNA, 19 nt, artificial
  Chemically Synthesized
acaugaaccuuccuuuaaa

SEQ ID NO: 5393 - RNA, 19 nt, artificial
  Chemically Synthesized
aaauaucgagggauuuaga

SEQ ID NO: 5394 - RNA, 19 nt, artificial
  Chemically Synthesized
uacacagcccgaagugaaa

SEQ ID NO: 5395 - RNA, 19 nt, artificial
  Chemically Synthesized
aacugguaaauuccaacuu

SEQ ID NO: 5396 - RNA, 19 nt, artificial
  Chemically Synthesized
uaugugcuacauaaaaggu

SEQ ID NO: 5397 - RNA, 19 nt, artificial
  Chemically Synthesized
aaacaaaaccgaacaaaac

SEQ ID NO: 5398 - RNA, 19 nt, artificial
  Chemically Synthesized
cauauucuuaauucgagcu

SEQ ID NO: 5399 - RNA, 19 nt, artificial
  Chemically Synthesized
agcuguuuacguuugacgu

SEQ ID NO: 5400 - RNA, 19 nt, artificial
  Chemically Synthesized
caaaugcguguccucagag

SEQ ID NO: 5401 - RNA, 19 nt, artificial
  Chemically Synthesized
caaaacaugccacuuuggc

SEQ ID NO: 5402 - RNA, 19 nt, artificial
  Chemically Synthesized
ucuccaagucccggguuaa

SEQ ID NO: 5403 - RNA, 19 nt, artificial
  Chemically Synthesized
uccauacacaggcaaugaa

SEQ ID NO: 5404 - RNA, 19 nt, artificial
  Chemically Synthesized
guuaacucuucguggucca

SEQ ID NO: 5405 - RNA, 19 nt, artificial
  Chemically Synthesized
acugguaaauuccaacuuu

SEQ ID NO: 5406 - RNA, 19 nt, artificial
  Chemically Synthesized
acaugcagcuaucuaacaa

SEQ ID NO: 5407 - RNA, 19 nt, artificial
  Chemically Synthesized
cagcuaucuaacaaacuuu

SEQ ID NO: 5408 - RNA, 19 nt, artificial
  Chemically Synthesized
ugcauaaugcuacauccaa

SEQ ID NO: 5409 - RNA, 19 nt, artificial
  Chemically Synthesized
caggauguccauuccauga

SEQ ID NO: 5410 - RNA, 19 nt, artificial
  Chemically Synthesized
gauguaucugauaaacaag

SEQ ID NO: 5411 - RNA, 19 nt, artificial
  Chemically Synthesized
uguuuacguuugacgucuu

SEQ ID NO: 5412 - RNA, 19 nt, artificial
  Chemically Synthesized
guuuacguuugacgucuuc

SEQ ID NO: 5413 - RNA, 19 nt, artificial
  Chemically Synthesized
guagaagaaucgucgguug

SEQ ID NO: 5414 - RNA, 19 nt, artificial
  Chemically Synthesized
ccucuugccacucguacuu

SEQ ID NO: 5415 - RNA, 19 nt, artificial
  Chemically Synthesized
acuucaaaugguuuuucca

SEQ ID NO: 5416 - RNA, 19 nt, artificial
  Chemically Synthesized
aguauccauuucacuuauc

SEQ ID NO: 5417 - RNA, 19 nt, artificial
  Chemically Synthesized
cuuauccuacaagugugcu

SEQ ID NO: 5418 - RNA, 19 nt, artificial
  Chemically Synthesized
guuagacacucgcacguuu

SEQ ID NO: 5419 - RNA, 19 nt, artificial
  Chemically Synthesized
aucaccauucugcugagua

SEQ ID NO: 5420 - RNA, 19 nt, artificial
  Chemically Synthesized
cuuuuagaggcagaucauu

SEQ ID NO: 5421 - RNA, 19 nt, artificial
  Chemically Synthesized
ccguaaauguccauuuaua

SEQ ID NO: 5422 - RNA, 19 nt, artificial
  Chemically Synthesized
agcaaauggcagaaccaaa

SEQ ID NO: 5423 - RNA, 19 nt, artificial
  Chemically Synthesized
gccuuuuaacguagauaua

SEQ ID NO: 5424 - RNA, 19 nt, artificial
  Chemically Synthesized
cccgauugaaagaaccaga

SEQ ID NO: 5425 - RNA, 19 nt, artificial
  Chemically Synthesized
cgauugaaagaaccagaga

SEQ ID NO: 5426 - RNA, 19 nt, artificial
  Chemically Synthesized
gggaaacuuagaucaucag

SEQ ID NO: 5427 - RNA, 19 nt, artificial
  Chemically Synthesized
cucgggaaacuuagaucau

SEQ ID NO: 5428 - RNA, 19 nt, artificial
  Chemically Synthesized
aaaauguccugccuuuuaa

SEQ ID NO: 5429 - RNA, 19 nt, artificial
  Chemically Synthesized
caguaaccaugcccgcaua

SEQ ID NO: 5430 - RNA, 19 nt, artificial
  Chemically Synthesized
ggaaacuuagaucaucagu

SEQ ID NO: 5431 - RNA, 19 nt, artificial
  Chemically Synthesized
cauuuugugaacuagggaa

SEQ ID NO: 5432 - RNA, 19 nt, artificial
  Chemically Synthesized
cucugagaaaccucgggaa

SEQ ID NO: 5433 - RNA, 19 nt, artificial
  Chemically Synthesized
gcauuuugugaacuaggga

SEQ ID NO: 5434 - RNA, 19 nt, artificial
  Chemically Synthesized
cggaagcugucgacuucau

SEQ ID NO: 5435 - RNA, 19 nt, artificial
  Chemically Synthesized
ccagagaggcucugagaaa

SEQ ID NO: 5436 - RNA, 19 nt, artificial
  Chemically Synthesized
aaaccucgggaaacuuaga

SEQ ID NO: 5437 - RNA, 19 nt, artificial
  Chemically Synthesized
gguuacuggcuucucuuga

SEQ ID NO: 5438 - RNA, 19 nt, artificial
  Chemically Synthesized
cauucaugugggcauuucu

SEQ ID NO: 5439 - RNA, 19 nt, artificial
  Chemically Synthesized
uguccugccuuuuaacgua

SEQ ID NO: 5440 - RNA, 19 nt, artificial
  Chemically Synthesized
ccgcuuucguaguuuucau

SEQ ID NO: 5441 - RNA, 19 nt, artificial
  Chemically Synthesized
ccucgggaaacuuagauca

SEQ ID NO: 5442 - RNA, 19 nt, artificial
  Chemically Synthesized
uaccguaaauguccauuua

SEQ ID NO: 5443 - RNA, 19 nt, artificial
  Chemically Synthesized
ucgacuucaugacaagcau

SEQ ID NO: 5444 - RNA, 19 nt, artificial
  Chemically Synthesized
ccugccuuuuaacguagau

SEQ ID NO: 5445 - RNA, 19 nt, artificial
  Chemically Synthesized
cgacuucaugacaagcauu

SEQ ID NO: 5446 - RNA, 19 nt, artificial
  Chemically Synthesized
gaaaccucgggaaacuuag

SEQ ID NO: 5447 - RNA, 19 nt, artificial
  Chemically Synthesized
caccagaggcaguaaccau

SEQ ID NO: 5448 - RNA, 19 nt, artificial
  Chemically Synthesized
gccuuuucacuguguugga

SEQ ID NO: 5449 - RNA, 19 nt, artificial
  Chemically Synthesized
gcugucgacuucaugacaa

SEQ ID NO: 5450 - RNA, 19 nt, artificial
  Chemically Synthesized
gaagcugucgacuucauga

SEQ ID NO: 5451 - RNA, 19 nt, artificial
  Chemically Synthesized
gaguuuucuggagugagca

SEQ ID NO: 5452 - RNA, 19 nt, artificial
  Chemically Synthesized
ccacuaccguaaaugucca

SEQ ID NO: 5453 - RNA, 19 nt, artificial
  Chemically Synthesized
ugagucacacugcuagcaa

SEQ ID NO: 5454 - RNA, 19 nt, artificial
  Chemically Synthesized
cgcacauucaugugggcau

SEQ ID NO: 5455 - RNA, 19 nt, artificial
  Chemically Synthesized
ccgauugaaagaaccagag

SEQ ID NO: 5456 - RNA, 19 nt, artificial
  Chemically Synthesized
uaaccaugcccgcauagau

SEQ ID NO: 5457 - RNA, 19 nt, artificial
  Chemically Synthesized
acaagcauuuugugaacua

SEQ ID NO: 5458 - RNA, 19 nt, artificial
  Chemically Synthesized
gcuucugccuuuucacugu

SEQ ID NO: 5459 - RNA, 19 nt, artificial
  Chemically Synthesized
cuagcaaauggcagaacca

SEQ ID NO: 5460 - RNA, 19 nt, artificial
  Chemically Synthesized
ggaguuuucuggagugagc

SEQ ID NO: 5461 - RNA, 19 nt, artificial
  Chemically Synthesized
cucuugagucacacugcua

SEQ ID NO: 5462 - RNA, 19 nt, artificial
  Chemically Synthesized
caugacaagcauuuuguga

SEQ ID NO: 5463 - RNA, 19 nt, artificial
  Chemically Synthesized
aaaaauguccugccuuuua

SEQ ID NO: 5464 - RNA, 19 nt, artificial
  Chemically Synthesized
caagcauuuugugaacuag

SEQ ID NO: 5465 - RNA, 19 nt, artificial
  Chemically Synthesized
uguguuggaguuuucugga

SEQ ID NO: 5466 - RNA, 19 nt, artificial
  Chemically Synthesized
agaucaucagucaccgaag

SEQ ID NO: 5467 - RNA, 19 nt, artificial
  Chemically Synthesized
aaccagagaggcucugaga

SEQ ID NO: 5468 - RNA, 19 nt, artificial
  Chemically Synthesized
gcuucucuugagucacacu

SEQ ID NO: 5469 - RNA, 19 nt, artificial
  Chemically Synthesized
augacaagcauuuugugaa

SEQ ID NO: 5470 - RNA, 19 nt, artificial
  Chemically Synthesized
cgcuuucguaguuuucauu

SEQ ID NO: 5471 - RNA, 19 nt, artificial
  Chemically Synthesized
gauugaaagaaccagagag

SEQ ID NO: 5472 - RNA, 19 nt, artificial
  Chemically Synthesized
acuggcuucucuugaguca

SEQ ID NO: 5473 - RNA, 19 nt, artificial
  Chemically Synthesized
cccuaagcgcacauucaug

SEQ ID NO: 5474 - RNA, 19 nt, artificial
  Chemically Synthesized
cugccuuuuaacguagaua

SEQ ID NO: 5475 - RNA, 19 nt, artificial
  Chemically Synthesized
ugccuuuuaacguagauau

SEQ ID NO: 5476 - RNA, 19 nt, artificial
  Chemically Synthesized
uccugccuuuuaacguaga

SEQ ID NO: 5477 - RNA, 19 nt, artificial
  Chemically Synthesized
uagcaaauggcagaaccaa

SEQ ID NO: 5478 - RNA, 19 nt, artificial
  Chemically Synthesized
cacuguguuggaguuuucu

SEQ ID NO: 5479 - RNA, 19 nt, artificial
  Chemically Synthesized
gcacauucaugugggcauu

SEQ ID NO: 5480 - RNA, 19 nt, artificial
  Chemically Synthesized
cacuaccguaaauguccau

SEQ ID NO: 5481 - RNA, 19 nt, artificial
  Chemically Synthesized
uaacguagauauaugccuu

SEQ ID NO: 5482 - RNA, 19 nt, artificial
  Chemically Synthesized
ugugaacuagggaagcuca

SEQ ID NO: 5483 - RNA, 19 nt, artificial
  Chemically Synthesized
aaauguccugccuuuuaac

SEQ ID NO: 5484 - RNA, 19 nt, artificial
  Chemically Synthesized
ugacaagcauuuugugaac

SEQ ID NO: 5485 - RNA, 19 nt, artificial
  Chemically Synthesized
cugucgacuucaugacaag

SEQ ID NO: 5486 - RNA, 19 nt, artificial
  Chemically Synthesized
ccuaagcgcacauucaugu

SEQ ID NO: 5487 - RNA, 19 nt, artificial
  Chemically Synthesized
acugcuagcaaauggcaga

SEQ ID NO: 5488 - RNA, 19 nt, artificial
  Chemically Synthesized
ggguuacuggcuucucuug

SEQ ID NO: 5489 - RNA, 19 nt, artificial
  Chemically Synthesized
accagagaggcucugagaa

SEQ ID NO: 5490 - RNA, 19 nt, artificial
  Chemically Synthesized
agcugucgacuucaugaca

SEQ ID NO: 5491 - RNA, 19 nt, artificial
  Chemically Synthesized
ccgcuucugccuuuucacu

SEQ ID NO: 5492 - RNA, 19 nt, artificial
  Chemically Synthesized
cuaccguaaauguccauuu

SEQ ID NO: 5493 - RNA, 19 nt, artificial
  Chemically Synthesized
uuaaaaauguccugccuuu

SEQ ID NO: 5494 - RNA, 19 nt, artificial
  Chemically Synthesized
gagcuuuuaaaaauguccu

SEQ ID NO: 5495 - RNA, 19 nt, artificial
  Chemically Synthesized
ggaagcugucgacuucaug

SEQ ID NO: 5496 - RNA, 19 nt, artificial
  Chemically Synthesized
uguuggaguuuucuggagu

SEQ ID NO: 5497 - RNA, 19 nt, artificial
  Chemically Synthesized
aaagaaaaacaccgcuucu

SEQ ID NO: 5498 - RNA, 19 nt, artificial
  Chemically Synthesized
gaucaucagucaccgaagg

SEQ ID NO: 5499 - RNA, 19 nt, artificial
  Chemically Synthesized
ucucuugagucacacugcu

SEQ ID NO: 5500 - RNA, 19 nt, artificial
  Chemically Synthesized
cccgcuuucguaguuuuca

SEQ ID NO: 5501 - RNA, 19 nt, artificial
  Chemically Synthesized
cugcuagcaaauggcagaa

SEQ ID NO: 5502 - RNA, 19 nt, artificial
  Chemically Synthesized
ggcuucucuugagucacac

SEQ ID NO: 5503 - RNA, 19 nt, artificial
  Chemically Synthesized
uagaucaucagucaccgaa

SEQ ID NO: 5504 - RNA, 19 nt, artificial
  Chemically Synthesized
agucacacugcuagcaaau

SEQ ID NO: 5505 - RNA, 19 nt, artificial
  Chemically Synthesized
ucaugacaagcauuuugug

SEQ ID NO: 5506 - RNA, 19 nt, artificial
  Chemically Synthesized
auucaugugggcauuucuu

SEQ ID NO: 5507 - RNA, 19 nt, artificial
  Chemically Synthesized
guuggaguuuucuggagug

SEQ ID NO: 5508 - RNA, 19 nt, artificial
  Chemically Synthesized
cuguguuggaguuuucugg

SEQ ID NO: 5509 - RNA, 19 nt, artificial
  Chemically Synthesized
agucaccgaagguccuaca

SEQ ID NO: 5510 - RNA, 19 nt, artificial
  Chemically Synthesized
ucuugagucacacugcuag

SEQ ID NO: 5511 - RNA, 19 nt, artificial
  Chemically Synthesized
uuagaucaucagucaccga

SEQ ID NO: 5512 - RNA, 19 nt, artificial
  Chemically Synthesized
gaaacuuagaucaucaguc

SEQ ID NO: 5513 - RNA, 19 nt, artificial
  Chemically Synthesized
guguuggaguuuucuggag

SEQ ID NO: 5514 - RNA, 19 nt, artificial
  Chemically Synthesized
uuuucacuguguuggaguu

SEQ ID NO: 5515 - RNA, 19 nt, artificial
  Chemically Synthesized
accguaaauguccauuuau

SEQ ID NO: 5516 - RNA, 19 nt, artificial
  Chemically Synthesized
guaaccaugcccgcauaga

SEQ ID NO: 5517 - RNA, 19 nt, artificial
  Chemically Synthesized
aaaaaagaaaaacaccgcu

SEQ ID NO: 5518 - RNA, 19 nt, artificial
  Chemically Synthesized
agcauuuugugaacuaggg

SEQ ID NO: 5519 - RNA, 19 nt, artificial
  Chemically Synthesized
uggaguuuucuggagugag

SEQ ID NO: 5520 - RNA, 19 nt, artificial
  Chemically Synthesized
uaaaaauguccugccuuuu

SEQ ID NO: 5521 - RNA, 19 nt, artificial
  Chemically Synthesized
cugagaaaccucgggaaac

SEQ ID NO: 5522 - RNA, 19 nt, artificial
  Chemically Synthesized
gagaggcucugagaaaccu

SEQ ID NO: 5523 - RNA, 19 nt, artificial
  Chemically Synthesized
accagaggcaguaaccaug

SEQ ID NO: 5524 - RNA, 19 nt, artificial
  Chemically Synthesized
acacugcuagcaaauggca

SEQ ID NO: 5525 - RNA, 19 nt, artificial
  Chemically Synthesized
cuuuucacuguguuggagu

SEQ ID NO: 5526 - RNA, 19 nt, artificial
  Chemically Synthesized
accgcuucugccuuuucac

SEQ ID NO: 5527 - RNA, 19 nt, artificial
  Chemically Synthesized
cuugagucacacugcuagc

SEQ ID NO: 5528 - RNA, 19 nt, artificial
  Chemically Synthesized
gugaacuagggaagcucag

SEQ ID NO: 5529 - RNA, 19 nt, artificial
  Chemically Synthesized
augugggcauuucuugcga

SEQ ID NO: 5530 - RNA, 19 nt, artificial
  Chemically Synthesized
uuggaguuuucuggaguga

SEQ ID NO: 5531 - RNA, 19 nt, artificial
  Chemically Synthesized
ucacuguguuggaguuuuc

SEQ ID NO: 5532 - RNA, 19 nt, artificial
  Chemically Synthesized
aaaaagaaaaacaccgcuu

SEQ ID NO: 5533 - RNA, 19 nt, artificial
  Chemically Synthesized
cguagauauaugccuuccc

SEQ ID NO: 5534 - RNA, 19 nt, artificial
  Chemically Synthesized
agaaccagagaggcucuga

SEQ ID NO: 5535 - RNA, 19 nt, artificial
  Chemically Synthesized
cacugcuagcaaauggcag

SEQ ID NO: 5536 - RNA, 19 nt, artificial
  Chemically Synthesized
aagcauuuugugaacuagg

SEQ ID NO: 5537 - RNA, 19 nt, artificial
  Chemically Synthesized
uuuuaaaaauguccugccu

SEQ ID NO: 5538 - RNA, 19 nt, artificial
  Chemically Synthesized
cagagaggcucugagaaac

SEQ ID NO: 5539 - RNA, 19 nt, artificial
  Chemically Synthesized
auuucuugcgagccucgca

SEQ ID NO: 5540 - RNA, 19 nt, artificial
  Chemically Synthesized
ccuuuucacuguguuggag

SEQ ID NO: 5541 - RNA, 19 nt, artificial
  Chemically Synthesized
guccugccuuuuaacguag

SEQ ID NO: 5542 - RNA, 19 nt, artificial
  Chemically Synthesized
aucagucaccgaagguccu

SEQ ID NO: 5543 - RNA, 19 nt, artificial
  Chemically Synthesized
aaccucgggaaacuuagau

SEQ ID NO: 5544 - RNA, 19 nt, artificial
  Chemically Synthesized
aaccaugcccgcauagaug

SEQ ID NO: 5545 - RNA, 19 nt, artificial
  Chemically Synthesized
agcuuuuaaaaauguccug

SEQ ID NO: 5546 - RNA, 19 nt, artificial
  Chemically Synthesized
cuggcuucucuugagucac

SEQ ID NO: 5547 - RNA, 19 nt, artificial
  Chemically Synthesized
aaaacaccgcuucugccuu

SEQ ID NO: 5548 - RNA, 19 nt, artificial
  Chemically Synthesized
caaauggcagaaccaaagc

SEQ ID NO: 5549 - RNA, 19 nt, artificial
  Chemically Synthesized
ucugccuuuucacuguguu

SEQ ID NO: 5550 - RNA, 19 nt, artificial
  Chemically Synthesized
cccacuaccguaaaugucc

SEQ ID NO: 5551 - RNA, 19 nt, artificial
  Chemically Synthesized
gcuuucguaguuuucauuu

SEQ ID NO: 5552 - RNA, 19 nt, artificial
  Chemically Synthesized
aaagaaccagagaggcucu

SEQ ID NO: 5553 - RNA, 19 nt, artificial
  Chemically Synthesized
gcuagcaaauggcagaacc

SEQ ID NO: 5554 - RNA, 19 nt, artificial
  Chemically Synthesized
cugccuuuucacuguguug

SEQ ID NO: 5555 - RNA, 19 nt, artificial
  Chemically Synthesized
aaaagaaaaacaccgcuuc

SEQ ID NO: 5556 - RNA, 19 nt, artificial
  Chemically Synthesized
gacaagcauuuugugaacu

SEQ ID NO: 5557 - RNA, 19 nt, artificial
  Chemically Synthesized
uuuaaaaauguccugccuu

SEQ ID NO: 5558 - RNA, 19 nt, artificial
  Chemically Synthesized
ucagucaccgaagguccua

SEQ ID NO: 5559 - RNA, 19 nt, artificial
  Chemically Synthesized
ugaaagaaccagagaggcu

SEQ ID NO: 5560 - RNA, 19 nt, artificial
  Chemically Synthesized
ugugggcauuucuugcgag

SEQ ID NO: 5561 - RNA, 19 nt, artificial
  Chemically Synthesized
agagcuuuuaaaaaugucc

SEQ ID NO: 5562 - RNA, 19 nt, artificial
  Chemically Synthesized
guuuucuggagugagcacu

SEQ ID NO: 5563 - RNA, 19 nt, artificial
  Chemically Synthesized
aacaccgcuucugccuuuu

SEQ ID NO: 5564 - RNA, 19 nt, artificial
  Chemically Synthesized
gaaaaacaccgcuucugcc

SEQ ID NO: 5565 - RNA, 19 nt, artificial
  Chemically Synthesized
auguccugccuuuuaacgu

SEQ ID NO: 5566 - RNA, 19 nt, artificial
  Chemically Synthesized
auuuugugaacuagggaag

SEQ ID NO: 5567 - RNA, 19 nt, artificial
  Chemically Synthesized
gucgacuucaugacaagca

SEQ ID NO: 5568 - RNA, 19 nt, artificial
  Chemically Synthesized
acuguguuggaguuuucug

SEQ ID NO: 5569 - RNA, 19 nt, artificial
  Chemically Synthesized
uucacuguguuggaguuuu

SEQ ID NO: 5570 - RNA, 19 nt, artificial
  Chemically Synthesized
uugagucacacugcuagca

SEQ ID NO: 5571 - RNA, 19 nt, artificial
  Chemically Synthesized
acuucaugacaagcauuuu

SEQ ID NO: 5572 - RNA, 19 nt, artificial
  Chemically Synthesized
guaaaaaagaaaaacaccg

SEQ ID NO: 5573 - RNA, 19 nt, artificial
  Chemically Synthesized
gaaagaaccagagaggcuc

SEQ ID NO: 5574 - RNA, 19 nt, artificial
  Chemically Synthesized
uucaugacaagcauuuugu

SEQ ID NO: 5575 - RNA, 19 nt, artificial
  Chemically Synthesized
cuucaugacaagcauuuug

SEQ ID NO: 5576 - RNA, 19 nt, artificial
  Chemically Synthesized
uuucuggagugagcacuca

SEQ ID NO: 5577 - RNA, 19 nt, artificial
  Chemically Synthesized
cuucugccuuuucacugug

SEQ ID NO: 5578 - RNA, 19 nt, artificial
  Chemically Synthesized
accucgggaaacuuagauc

SEQ ID NO: 5579 - RNA, 19 nt, artificial
  Chemically Synthesized
agaaaaacaccgcuucugc

SEQ ID NO: 5580 - RNA, 19 nt, artificial
  Chemically Synthesized
uuaacguagauauaugccu

SEQ ID NO: 5581 - RNA, 19 nt, artificial
  Chemically Synthesized
cuuagaucaucagucaccg

SEQ ID NO: 5582 - RNA, 19 nt, artificial
  Chemically Synthesized
agaggcucugagaaaccuc

SEQ ID NO: 5583 - RNA, 19 nt, artificial
  Chemically Synthesized
cacacugcuagcaaauggc

SEQ ID NO: 5584 - RNA, 19 nt, artificial
  Chemically Synthesized
cacauucaugugggcauuu

SEQ ID NO: 5585 - RNA, 19 nt, artificial
  Chemically Synthesized
aagcgcacauucauguggg

SEQ ID NO: 5586 - RNA, 19 nt, artificial
  Chemically Synthesized
aaaaacaccgcuucugccu

SEQ ID NO: 5587 - RNA, 19 nt, artificial
  Chemically Synthesized
aguuuucuggagugagcac

SEQ ID NO: 5588 - RNA, 19 nt, artificial
  Chemically Synthesized
uucugccuuuucacugugu

SEQ ID NO: 5589 - RNA, 19 nt, artificial
  Chemically Synthesized
cuuuuaaaaauguccugcc

SEQ ID NO: 5590 - RNA, 19 nt, artificial
  Chemically Synthesized
aaauggcagaaccaaagcu

SEQ ID NO: 5591 - RNA, 19 nt, artificial
  Chemically Synthesized
cgcuucugccuuuucacug

SEQ ID NO: 5592 - RNA, 19 nt, artificial
  Chemically Synthesized
aguaaccaugcccgcauag

SEQ ID NO: 5593 - RNA, 19 nt, artificial
  Chemically Synthesized
ucaugugggcauuucuugc

SEQ ID NO: 5594 - RNA, 19 nt, artificial
  Chemically Synthesized
acuaccguaaauguccauu

SEQ ID NO: 5595 - RNA, 19 nt, artificial
  Chemically Synthesized
acauucaugugggcauuuc

SEQ ID NO: 5596 - RNA, 19 nt, artificial
  Chemically Synthesized
cuucucuugagucacacug

SEQ ID NO: 5597 - RNA, 19 nt, artificial
  Chemically Synthesized
cuaagcgcacauucaugug

SEQ ID NO: 5598 - RNA, 19 nt, artificial
  Chemically Synthesized
acaccgcuucugccuuuuc

SEQ ID NO: 5599 - RNA, 19 nt, artificial
  Chemically Synthesized
gcuuuuaaaaauguccugc

SEQ ID NO: 5600 - RNA, 19 nt, artificial
  Chemically Synthesized
ucaucagucaccgaagguc

SEQ ID NO: 5601 - RNA, 19 nt, artificial
  Chemically Synthesized
ugaacuagggaagcucagg

SEQ ID NO: 5602 - RNA, 19 nt, artificial
  Chemically Synthesized
uucaugugggcauuucuug

SEQ ID NO: 5603 - RNA, 19 nt, artificial
  Chemically Synthesized
aacguagauauaugccuuc

SEQ ID NO: 5604 - RNA, 19 nt, artificial
  Chemically Synthesized
agagaggcucugagaaacc

SEQ ID NO: 5605 - RNA, 19 nt, artificial
  Chemically Synthesized
aucaucagucaccgaaggu

SEQ ID NO: 5606 - RNA, 19 nt, artificial
  Chemically Synthesized
uuugugaacuagggaagcu

SEQ ID NO: 5607 - RNA, 19 nt, artificial
  Chemically Synthesized
uucuggagugagcacucac

SEQ ID NO: 5608 - RNA, 19 nt, artificial
  Chemically Synthesized
aacuuagaucaucagucac

SEQ ID NO: 5609 - RNA, 19 nt, artificial
  Chemically Synthesized
uucucuugagucacacugc

SEQ ID NO: 5610 - RNA, 19 nt, artificial
  Chemically Synthesized
uuuugugaacuagggaagc

SEQ ID NO: 5611 - RNA, 19 nt, artificial
  Chemically Synthesized
auugaaagaaccagagagg

SEQ ID NO: 5612 - RNA, 19 nt, artificial
  Chemically Synthesized
aagcugucgacuucaugac

SEQ ID NO: 5613 - RNA, 19 nt, artificial
  Chemically Synthesized
uaaaaaagaaaaacaccgc

SEQ ID NO: 5614 - RNA, 19 nt, artificial
  Chemically Synthesized
uacuggcuucucuugaguc

SEQ ID NO: 5615 - RNA, 19 nt, artificial
  Chemically Synthesized
acguagauauaugccuucc

SEQ ID NO: 5616 - RNA, 19 nt, artificial
  Chemically Synthesized
uuucacuguguuggaguuu

SEQ ID NO: 5617 - RNA, 19 nt, artificial
  Chemically Synthesized
aauguccugccuuuuaacg

SEQ ID NO: 5618 - RNA, 19 nt, artificial
  Chemically Synthesized
uuuucuggagugagcacuc

SEQ ID NO: 5619 - RNA, 19 nt, artificial
  Chemically Synthesized
ugucgacuucaugacaagc

SEQ ID NO: 5620 - RNA, 19 nt, artificial
  Chemically Synthesized
caugugggcauuucuugcg

SEQ ID NO: 5621 - RNA, 19 nt, artificial
  Chemically Synthesized
aagaaaaacaccgcuucug

SEQ ID NO: 5622 - RNA, 19 nt, artificial
  Chemically Synthesized
uugugaacuagggaagcuc

SEQ ID NO: 5623 - RNA, 19 nt, artificial
  Chemically Synthesized
ugcuagcaaauggcagaac

SEQ ID NO: 5624 - RNA, 19 nt, artificial
  Chemically Synthesized
acuuagaucaucagucacc

SEQ ID NO: 5625 - RNA, 19 nt, artificial
  Chemically Synthesized
gucacacugcuagcaaaug

SEQ ID NO: 5626 - RNA, 19 nt, artificial
  Chemically Synthesized
aauggcagaaccaaagcuc

SEQ ID NO: 5627 - RNA, 19 nt, artificial
  Chemically Synthesized
aagaaccagagaggcucug

SEQ ID NO: 5628 - RNA, 19 nt, artificial
  Chemically Synthesized
uugaaagaaccagagaggc

SEQ ID NO: 5629 - RNA, 19 nt, artificial
  Chemically Synthesized
ugccuuuucacuguguugg

SEQ ID NO: 5630 - RNA, 19 nt, artificial
  Chemically Synthesized
uaagcgcacauucaugugg

SEQ ID NO: 5631 - RNA, 19 nt, artificial
  Chemically Synthesized
uuuaacguagauauaugcc

SEQ ID NO: 5632 - RNA, 19 nt, artificial
  Chemically Synthesized
uauaaauggacauuuacgg

SEQ ID NO: 5633 - RNA, 19 nt, artificial
  Chemically Synthesized
uuugguucugccauuugcu

SEQ ID NO: 5634 - RNA, 19 nt, artificial
  Chemically Synthesized
uauaucuacguuaaaaggc

SEQ ID NO: 5635 - RNA, 19 nt, artificial
  Chemically Synthesized
ucugguucuuucaaucggg

SEQ ID NO: 5636 - RNA, 19 nt, artificial
  Chemically Synthesized
ucucugguucuuucaaucg

SEQ ID NO: 5637 - RNA, 19 nt, artificial
  Chemically Synthesized
cugaugaucuaaguuuccc

SEQ ID NO: 5638 - RNA, 19 nt, artificial
  Chemically Synthesized
augaucuaaguuucccgag

SEQ ID NO: 5639 - RNA, 19 nt, artificial
  Chemically Synthesized
uuaaaaggcaggacauuuu

SEQ ID NO: 5640 - RNA, 19 nt, artificial
  Chemically Synthesized
uaugcgggcaugguuacug

SEQ ID NO: 5641 - RNA, 19 nt, artificial
  Chemically Synthesized
acugaugaucuaaguuucc

SEQ ID NO: 5642 - RNA, 19 nt, artificial
  Chemically Synthesized
uucccuaguucacaaaaug

SEQ ID NO: 5643 - RNA, 19 nt, artificial
  Chemically Synthesized
uucccgagguuucucagag

SEQ ID NO: 5644 - RNA, 19 nt, artificial
  Chemically Synthesized
ucccuaguucacaaaaugc

SEQ ID NO: 5645 - RNA, 19 nt, artificial
  Chemically Synthesized
augaagucgacagcuuccg

SEQ ID NO: 5646 - RNA, 19 nt, artificial
  Chemically Synthesized
uuucucagagccucucugg

SEQ ID NO: 5647 - RNA, 19 nt, artificial
  Chemically Synthesized
ucuaaguuucccgagguuu

SEQ ID NO: 5648 - RNA, 19 nt, artificial
  Chemically Synthesized
ucaagagaagccaguaacc

SEQ ID NO: 5649 - RNA, 19 nt, artificial
  Chemically Synthesized
agaaaugcccacaugaaug

SEQ ID NO: 5650 - RNA, 19 nt, artificial
  Chemically Synthesized
uacguuaaaaggcaggaca

SEQ ID NO: 5651 - RNA, 19 nt, artificial
  Chemically Synthesized
augaaaacuacgaaagcgg

SEQ ID NO: 5652 - RNA, 19 nt, artificial
  Chemically Synthesized
ugaucuaaguuucccgagg

SEQ ID NO: 5653 - RNA, 19 nt, artificial
  Chemically Synthesized
uaaauggacauuuacggua

SEQ ID NO: 5654 - RNA, 19 nt, artificial
  Chemically Synthesized
augcuugucaugaagucga

SEQ ID NO: 5655 - RNA, 19 nt, artificial
  Chemically Synthesized
aucuacguuaaaaggcagg

SEQ ID NO: 5656 - RNA, 19 nt, artificial
  Chemically Synthesized
aaugcuugucaugaagucg

SEQ ID NO: 5657 - RNA, 19 nt, artificial
  Chemically Synthesized
cuaaguuucccgagguuuc

SEQ ID NO: 5658 - RNA, 19 nt, artificial
  Chemically Synthesized
augguuacugccucuggug

SEQ ID NO: 5659 - RNA, 19 nt, artificial
  Chemically Synthesized
uccaacacagugaaaaggc

SEQ ID NO: 5660 - RNA, 19 nt, artificial
  Chemically Synthesized
uugucaugaagucgacagc

SEQ ID NO: 5661 - RNA, 19 nt, artificial
  Chemically Synthesized
ucaugaagucgacagcuuc

SEQ ID NO: 5662 - RNA, 19 nt, artificial
  Chemically Synthesized
ugcucacuccagaaaacuc

SEQ ID NO: 5663 - RNA, 19 nt, artificial
  Chemically Synthesized
uggacauuuacgguagugg

SEQ ID NO: 5664 - RNA, 19 nt, artificial
  Chemically Synthesized
uugcuagcagugugacuca

SEQ ID NO: 5665 - RNA, 19 nt, artificial
  Chemically Synthesized
augcccacaugaaugugcg

SEQ ID NO: 5666 - RNA, 19 nt, artificial
  Chemically Synthesized
cucugguucuuucaaucgg

SEQ ID NO: 5667 - RNA, 19 nt, artificial
  Chemically Synthesized
aucuaugcgggcaugguua

SEQ ID NO: 5668 - RNA, 19 nt, artificial
  Chemically Synthesized
uaguucacaaaaugcuugu

SEQ ID NO: 5669 - RNA, 19 nt, artificial
  Chemically Synthesized
acagugaaaaggcagaagc

SEQ ID NO: 5670 - RNA, 19 nt, artificial
  Chemically Synthesized
ugguucugccauuugcuag

SEQ ID NO: 5671 - RNA, 19 nt, artificial
  Chemically Synthesized
gcucacuccagaaaacucc

SEQ ID NO: 5672 - RNA, 19 nt, artificial
  Chemically Synthesized
uagcagugugacucaagag

SEQ ID NO: 5673 - RNA, 19 nt, artificial
  Chemically Synthesized
ucacaaaaugcuugucaug

SEQ ID NO: 5674 - RNA, 19 nt, artificial
  Chemically Synthesized
uaaaaggcaggacauuuuu

SEQ ID NO: 5675 - RNA, 19 nt, artificial
  Chemically Synthesized
cuaguucacaaaaugcuug

SEQ ID NO: 5676 - RNA, 19 nt, artificial
  Chemically Synthesized
uccagaaaacuccaacaca

SEQ ID NO: 5677 - RNA, 19 nt, artificial
  Chemically Synthesized
cuucggugacugaugaucu

SEQ ID NO: 5678 - RNA, 19 nt, artificial
  Chemically Synthesized
ucucagagccucucugguu

SEQ ID NO: 5679 - RNA, 19 nt, artificial
  Chemically Synthesized
agugugacucaagagaagc

SEQ ID NO: 5680 - RNA, 19 nt, artificial
  Chemically Synthesized
uucacaaaaugcuugucau

SEQ ID NO: 5681 - RNA, 19 nt, artificial
  Chemically Synthesized
aaugaaaacuacgaaagcg

SEQ ID NO: 5682 - RNA, 19 nt, artificial
  Chemically Synthesized
cucucugguucuuucaauc

SEQ ID NO: 5683 - RNA, 19 nt, artificial
  Chemically Synthesized
ugacucaagagaagccagu

SEQ ID NO: 5684 - RNA, 19 nt, artificial
  Chemically Synthesized
caugaaugugcgcuuaggg

SEQ ID NO: 5685 - RNA, 19 nt, artificial
  Chemically Synthesized
uaucuacguuaaaaggcag

SEQ ID NO: 5686 - RNA, 19 nt, artificial
  Chemically Synthesized
auaucuacguuaaaaggca

SEQ ID NO: 5687 - RNA, 19 nt, artificial
  Chemically Synthesized
ucuacguuaaaaggcagga

SEQ ID NO: 5688 - RNA, 19 nt, artificial
  Chemically Synthesized
uugguucugccauuugcua

SEQ ID NO: 5689 - RNA, 19 nt, artificial
  Chemically Synthesized
agaaaacuccaacacagug

SEQ ID NO: 5690 - RNA, 19 nt, artificial
  Chemically Synthesized
aaugcccacaugaaugugc

SEQ ID NO: 5691 - RNA, 19 nt, artificial
  Chemically Synthesized
auggacauuuacgguagug

SEQ ID NO: 5692 - RNA, 19 nt, artificial
  Chemically Synthesized
aaggcauauaucuacguua

SEQ ID NO: 5693 - RNA, 19 nt, artificial
  Chemically Synthesized
ugagcuucccuaguucaca

SEQ ID NO: 5694 - RNA, 19 nt, artificial
  Chemically Synthesized
guuaaaaggcaggacauuu

SEQ ID NO: 5695 - RNA, 19 nt, artificial
  Chemically Synthesized
guucacaaaaugcuuguca

SEQ ID NO: 5696 - RNA, 19 nt, artificial
  Chemically Synthesized
cuugucaugaagucgacag

SEQ ID NO: 5697 - RNA, 19 nt, artificial
  Chemically Synthesized
acaugaaugugcgcuuagg

SEQ ID NO: 5698 - RNA, 19 nt, artificial
  Chemically Synthesized
ucugccauuugcuagcagu

SEQ ID NO: 5699 - RNA, 19 nt, artificial
  Chemically Synthesized
caagagaagccaguaaccc

SEQ ID NO: 5700 - RNA, 19 nt, artificial
  Chemically Synthesized
uucucagagccucucuggu

SEQ ID NO: 5701 - RNA, 19 nt, artificial
  Chemically Synthesized
ugucaugaagucgacagcu

SEQ ID NO: 5702 - RNA, 19 nt, artificial
  Chemically Synthesized
agugaaaaggcagaagcgg

SEQ ID NO: 5703 - RNA, 19 nt, artificial
  Chemically Synthesized
aaauggacauuuacgguag

SEQ ID NO: 5704 - RNA, 19 nt, artificial
  Chemically Synthesized
aaaggcaggacauuuuuaa

SEQ ID NO: 5705 - RNA, 19 nt, artificial
  Chemically Synthesized
aggacauuuuuaaaagcuc

SEQ ID NO: 5706 - RNA, 19 nt, artificial
  Chemically Synthesized
caugaagucgacagcuucc

SEQ ID NO: 5707 - RNA, 19 nt, artificial
  Chemically Synthesized
acuccagaaaacuccaaca

SEQ ID NO: 5708 - RNA, 19 nt, artificial
  Chemically Synthesized
agaagcgguguuuuucuuu

SEQ ID NO: 5709 - RNA, 19 nt, artificial
  Chemically Synthesized
ccuucggugacugaugauc

SEQ ID NO: 5710 - RNA, 19 nt, artificial
  Chemically Synthesized
agcagugugacucaagaga

SEQ ID NO: 5711 - RNA, 19 nt, artificial
  Chemically Synthesized
ugaaaacuacgaaagcggg

SEQ ID NO: 5712 - RNA, 19 nt, artificial
  Chemically Synthesized
uucugccauuugcuagcag

SEQ ID NO: 5713 - RNA, 19 nt, artificial
  Chemically Synthesized
gugugacucaagagaagcc

SEQ ID NO: 5714 - RNA, 19 nt, artificial
  Chemically Synthesized
uucggugacugaugaucua

SEQ ID NO: 5715 - RNA, 19 nt, artificial
  Chemically Synthesized
auuugcuagcagugugacu

SEQ ID NO: 5716 - RNA, 19 nt, artificial
  Chemically Synthesized
cacaaaaugcuugucauga

SEQ ID NO: 5717 - RNA, 19 nt, artificial
  Chemically Synthesized
aagaaaugcccacaugaau

SEQ ID NO: 5718 - RNA, 19 nt, artificial
  Chemically Synthesized
cacuccagaaaacuccaac

SEQ ID NO: 5719 - RNA, 19 nt, artificial
  Chemically Synthesized
ccagaaaacuccaacacag

SEQ ID NO: 5720 - RNA, 19 nt, artificial
  Chemically Synthesized
uguaggaccuucggugacu

SEQ ID NO: 5721 - RNA, 19 nt, artificial
  Chemically Synthesized
cuagcagugugacucaaga

SEQ ID NO: 5722 - RNA, 19 nt, artificial
  Chemically Synthesized
ucggugacugaugaucuaa

SEQ ID NO: 5723 - RNA, 19 nt, artificial
  Chemically Synthesized
gacugaugaucuaaguuuc

SEQ ID NO: 5724 - RNA, 19 nt, artificial
  Chemically Synthesized
cuccagaaaacuccaacac

SEQ ID NO: 5725 - RNA, 19 nt, artificial
  Chemically Synthesized
aacuccaacacagugaaaa

SEQ ID NO: 5726 - RNA, 19 nt, artificial
  Chemically Synthesized
auaaauggacauuuacggu

SEQ ID NO: 5727 - RNA, 19 nt, artificial
  Chemically Synthesized
ucuaugcgggcaugguuac

SEQ ID NO: 5728 - RNA, 19 nt, artificial
  Chemically Synthesized
agcgguguuuuucuuuuuu

SEQ ID NO: 5729 - RNA, 19 nt, artificial
  Chemically Synthesized
cccuaguucacaaaaugcu

SEQ ID NO: 5730 - RNA, 19 nt, artificial
  Chemically Synthesized
cucacuccagaaaacucca

SEQ ID NO: 5731 - RNA, 19 nt, artificial
  Chemically Synthesized
aaaaggcaggacauuuuua

SEQ ID NO: 5732 - RNA, 19 nt, artificial
  Chemically Synthesized
guuucccgagguuucucag

SEQ ID NO: 5733 - RNA, 19 nt, artificial
  Chemically Synthesized
agguuucucagagccucuc

SEQ ID NO: 5734 - RNA, 19 nt, artificial
  Chemically Synthesized
caugguuacugccucuggu

SEQ ID NO: 5735 - RNA, 19 nt, artificial
  Chemically Synthesized
ugccauuugcuagcagugu

SEQ ID NO: 5736 - RNA, 19 nt, artificial
  Chemically Synthesized
acuccaacacagugaaaag

SEQ ID NO: 5737 - RNA, 19 nt, artificial
  Chemically Synthesized
gugaaaaggcagaagcggu

SEQ ID NO: 5738 - RNA, 19 nt, artificial
  Chemically Synthesized
gcuagcagugugacucaag

SEQ ID NO: 5739 - RNA, 19 nt, artificial
  Chemically Synthesized
cugagcuucccuaguucac

SEQ ID NO: 5740 - RNA, 19 nt, artificial
  Chemically Synthesized
ucgcaagaaaugcccacau

SEQ ID NO: 5741 - RNA, 19 nt, artificial
  Chemically Synthesized
ucacuccagaaaacuccaa

SEQ ID NO: 5742 - RNA, 19 nt, artificial
  Chemically Synthesized
gaaaacuccaacacaguga

SEQ ID NO: 5743 - RNA, 19 nt, artificial
  Chemically Synthesized
aagcgguguuuuucuuuuu

SEQ ID NO: 5744 - RNA, 19 nt, artificial
  Chemically Synthesized
gggaaggcauauaucuacg

SEQ ID NO: 5745 - RNA, 19 nt, artificial
  Chemically Synthesized
ucagagccucucugguucu

SEQ ID NO: 5746 - RNA, 19 nt, artificial
  Chemically Synthesized
cugccauuugcuagcagug

SEQ ID NO: 5747 - RNA, 19 nt, artificial
  Chemically Synthesized
ccuaguucacaaaaugcuu

SEQ ID NO: 5748 - RNA, 19 nt, artificial
  Chemically Synthesized
aggcaggacauuuuuaaaa

SEQ ID NO: 5749 - RNA, 19 nt, artificial
  Chemically Synthesized
guuucucagagccucucug

SEQ ID NO: 5750 - RNA, 19 nt, artificial
  Chemically Synthesized
ugcgaggcucgcaagaaau

SEQ ID NO: 5751 - RNA, 19 nt, artificial
  Chemically Synthesized
cuccaacacagugaaaagg

SEQ ID NO: 5752 - RNA, 19 nt, artificial
  Chemically Synthesized
cuacguuaaaaggcaggac

SEQ ID NO: 5753 - RNA, 19 nt, artificial
  Chemically Synthesized
aggaccuucggugacugau

SEQ ID NO: 5754 - RNA, 19 nt, artificial
  Chemically Synthesized
aucuaaguuucccgagguu

SEQ ID NO: 5755 - RNA, 19 nt, artificial
  Chemically Synthesized
caucuaugcgggcaugguu

SEQ ID NO: 5756 - RNA, 19 nt, artificial
  Chemically Synthesized
caggacauuuuuaaaagcu

SEQ ID NO: 5757 - RNA, 19 nt, artificial
  Chemically Synthesized
gugacucaagagaagccag

SEQ ID NO: 5758 - RNA, 19 nt, artificial
  Chemically Synthesized
aaggcagaagcgguguuuu

SEQ ID NO: 5759 - RNA, 19 nt, artificial
  Chemically Synthesized
gcuuugguucugccauuug

SEQ ID NO: 5760 - RNA, 19 nt, artificial
  Chemically Synthesized
aacacagugaaaaggcaga

SEQ ID NO: 5761 - RNA, 19 nt, artificial
  Chemically Synthesized
ggacauuuacgguaguggg

SEQ ID NO: 5762 - RNA, 19 nt, artificial
  Chemically Synthesized
aaaugaaaacuacgaaagc

SEQ ID NO: 5763 - RNA, 19 nt, artificial
  Chemically Synthesized
agagccucucugguucuuu

SEQ ID NO: 5764 - RNA, 19 nt, artificial
  Chemically Synthesized
gguucugccauuugcuagc

SEQ ID NO: 5765 - RNA, 19 nt, artificial
  Chemically Synthesized
caacacagugaaaaggcag

SEQ ID NO: 5766 - RNA, 19 nt, artificial
  Chemically Synthesized
gaagcgguguuuuucuuuu

SEQ ID NO: 5767 - RNA, 19 nt, artificial
  Chemically Synthesized
aguucacaaaaugcuuguc

SEQ ID NO: 5768 - RNA, 19 nt, artificial
  Chemically Synthesized
aaggcaggacauuuuuaaa

SEQ ID NO: 5769 - RNA, 19 nt, artificial
  Chemically Synthesized
uaggaccuucggugacuga

SEQ ID NO: 5770 - RNA, 19 nt, artificial
  Chemically Synthesized
agccucucugguucuuuca

SEQ ID NO: 5771 - RNA, 19 nt, artificial
  Chemically Synthesized
cucgcaagaaaugcccaca

SEQ ID NO: 5772 - RNA, 19 nt, artificial
  Chemically Synthesized
ggacauuuuuaaaagcucu

SEQ ID NO: 5773 - RNA, 19 nt, artificial
  Chemically Synthesized
agugcucacuccagaaaac

SEQ ID NO: 5774 - RNA, 19 nt, artificial
  Chemically Synthesized
aaaaggcagaagcgguguu

SEQ ID NO: 5775 - RNA, 19 nt, artificial
  Chemically Synthesized
ggcagaagcgguguuuuuc

SEQ ID NO: 5776 - RNA, 19 nt, artificial
  Chemically Synthesized
acguuaaaaggcaggacau

SEQ ID NO: 5777 - RNA, 19 nt, artificial
  Chemically Synthesized
cuucccuaguucacaaaau

SEQ ID NO: 5778 - RNA, 19 nt, artificial
  Chemically Synthesized
ugcuugucaugaagucgac

SEQ ID NO: 5779 - RNA, 19 nt, artificial
  Chemically Synthesized
cagaaaacuccaacacagu

SEQ ID NO: 5780 - RNA, 19 nt, artificial
  Chemically Synthesized
aaaacuccaacacagugaa

SEQ ID NO: 5781 - RNA, 19 nt, artificial
  Chemically Synthesized
ugcuagcagugugacucaa

SEQ ID NO: 5782 - RNA, 19 nt, artificial
  Chemically Synthesized
aaaaugcuugucaugaagu

SEQ ID NO: 5783 - RNA, 19 nt, artificial
  Chemically Synthesized
cgguguuuuucuuuuuuac

SEQ ID NO: 5784 - RNA, 19 nt, artificial
  Chemically Synthesized
gagccucucugguucuuuc

SEQ ID NO: 5785 - RNA, 19 nt, artificial
  Chemically Synthesized
acaaaaugcuugucaugaa

SEQ ID NO: 5786 - RNA, 19 nt, artificial
  Chemically Synthesized
caaaaugcuugucaugaag

SEQ ID NO: 5787 - RNA, 19 nt, artificial
  Chemically Synthesized
ugagugcucacuccagaaa

SEQ ID NO: 5788 - RNA, 19 nt, artificial
  Chemically Synthesized
cacagugaaaaggcagaag

SEQ ID NO: 5789 - RNA, 19 nt, artificial
  Chemically Synthesized
gaucuaaguuucccgaggu

SEQ ID NO: 5790 - RNA, 19 nt, artificial
  Chemically Synthesized
gcagaagcgguguuuuucu

SEQ ID NO: 5791 - RNA, 19 nt, artificial
  Chemically Synthesized
aggcauauaucuacguuaa

SEQ ID NO: 5792 - RNA, 19 nt, artificial
  Chemically Synthesized
cggugacugaugaucuaag

SEQ ID NO: 5793 - RNA, 19 nt, artificial
  Chemically Synthesized
gagguuucucagagccucu

SEQ ID NO: 5794 - RNA, 19 nt, artificial
  Chemically Synthesized
gccauuugcuagcagugug

SEQ ID NO: 5795 - RNA, 19 nt, artificial
  Chemically Synthesized
aaaugcccacaugaaugug

SEQ ID NO: 5796 - RNA, 19 nt, artificial
  Chemically Synthesized
cccacaugaaugugcgcuu

SEQ ID NO: 5797 - RNA, 19 nt, artificial
  Chemically Synthesized
aggcagaagcgguguuuuu

SEQ ID NO: 5798 - RNA, 19 nt, artificial
  Chemically Synthesized
gugcucacuccagaaaacu

SEQ ID NO: 5799 - RNA, 19 nt, artificial
  Chemically Synthesized
acacagugaaaaggcagaa

SEQ ID NO: 5800 - RNA, 19 nt, artificial
  Chemically Synthesized
ggcaggacauuuuuaaaag

SEQ ID NO: 5801 - RNA, 19 nt, artificial
  Chemically Synthesized
agcuuugguucugccauuu

SEQ ID NO: 5802 - RNA, 19 nt, artificial
  Chemically Synthesized
cagugaaaaggcagaagcg

SEQ ID NO: 5803 - RNA, 19 nt, artificial
  Chemically Synthesized
cuaugcgggcaugguuacu

SEQ ID NO: 5804 - RNA, 19 nt, artificial
  Chemically Synthesized
gcaagaaaugcccacauga

SEQ ID NO: 5805 - RNA, 19 nt, artificial
  Chemically Synthesized
aauggacauuuacgguagu

SEQ ID NO: 5806 - RNA, 19 nt, artificial
  Chemically Synthesized
gaaaugcccacaugaaugu

SEQ ID NO: 5807 - RNA, 19 nt, artificial
  Chemically Synthesized
cagugugacucaagagaag

SEQ ID NO: 5808 - RNA, 19 nt, artificial
  Chemically Synthesized
cacaugaaugugcgcuuag

SEQ ID NO: 5809 - RNA, 19 nt, artificial
  Chemically Synthesized
gaaaaggcagaagcggugu

SEQ ID NO: 5810 - RNA, 19 nt, artificial
  Chemically Synthesized
gcaggacauuuuuaaaagc

SEQ ID NO: 5811 - RNA, 19 nt, artificial
  Chemically Synthesized
gaccuucggugacugauga

SEQ ID NO: 5812 - RNA, 19 nt, artificial
  Chemically Synthesized
ccugagcuucccuaguuca

SEQ ID NO: 5813 - RNA, 19 nt, artificial
  Chemically Synthesized
caagaaaugcccacaugaa

SEQ ID NO: 5814 - RNA, 19 nt, artificial
  Chemically Synthesized
gaaggcauauaucuacguu

SEQ ID NO: 5815 - RNA, 19 nt, artificial
  Chemically Synthesized
gguuucucagagccucucu

SEQ ID NO: 5816 - RNA, 19 nt, artificial
  Chemically Synthesized
accuucggugacugaugau

SEQ ID NO: 5817 - RNA, 19 nt, artificial
  Chemically Synthesized
agcuucccuaguucacaaa

SEQ ID NO: 5818 - RNA, 19 nt, artificial
  Chemically Synthesized
gugagugcucacuccagaa

SEQ ID NO: 5819 - RNA, 19 nt, artificial
  Chemically Synthesized
gugacugaugaucuaaguu

SEQ ID NO: 5820 - RNA, 19 nt, artificial
  Chemically Synthesized
gcagugugacucaagagaa

SEQ ID NO: 5821 - RNA, 19 nt, artificial
  Chemically Synthesized
gcuucccuaguucacaaaa

SEQ ID NO: 5822 - RNA, 19 nt, artificial
  Chemically Synthesized
ccucucugguucuuucaau

SEQ ID NO: 5823 - RNA, 19 nt, artificial
  Chemically Synthesized
gucaugaagucgacagcuu

SEQ ID NO: 5824 - RNA, 19 nt, artificial
  Chemically Synthesized
gcgguguuuuucuuuuuua

SEQ ID NO: 5825 - RNA, 19 nt, artificial
  Chemically Synthesized
gacucaagagaagccagua

SEQ ID NO: 5826 - RNA, 19 nt, artificial
  Chemically Synthesized
ggaaggcauauaucuacgu

SEQ ID NO: 5827 - RNA, 19 nt, artificial
  Chemically Synthesized
aaacuccaacacagugaaa

SEQ ID NO: 5828 - RNA, 19 nt, artificial
  Chemically Synthesized
cguuaaaaggcaggacauu

SEQ ID NO: 5829 - RNA, 19 nt, artificial
  Chemically Synthesized
gagugcucacuccagaaaa

SEQ ID NO: 5830 - RNA, 19 nt, artificial
  Chemically Synthesized
gcuugucaugaagucgaca

SEQ ID NO: 5831 - RNA, 19 nt, artificial
  Chemically Synthesized
cgcaagaaaugcccacaug

SEQ ID NO: 5832 - RNA, 19 nt, artificial
  Chemically Synthesized
cagaagcgguguuuuucuu

SEQ ID NO: 5833 - RNA, 19 nt, artificial
  Chemically Synthesized
gagcuucccuaguucacaa

SEQ ID NO: 5834 - RNA, 19 nt, artificial
  Chemically Synthesized
guucugccauuugcuagca

SEQ ID NO: 5835 - RNA, 19 nt, artificial
  Chemically Synthesized
ggugacugaugaucuaagu

SEQ ID NO: 5836 - RNA, 19 nt, artificial
  Chemically Synthesized
cauuugcuagcagugugac

SEQ ID NO: 5837 - RNA, 19 nt, artificial
  Chemically Synthesized
gagcuuugguucugccauu

SEQ ID NO: 5838 - RNA, 19 nt, artificial
  Chemically Synthesized
cagagccucucugguucuu

SEQ ID NO: 5839 - RNA, 19 nt, artificial
  Chemically Synthesized
gccucucugguucuuucaa

SEQ ID NO: 5840 - RNA, 19 nt, artificial
  Chemically Synthesized
ccaacacagugaaaaggca

SEQ ID NO: 5841 - RNA, 19 nt, artificial
  Chemically Synthesized
ccacaugaaugugcgcuua

SEQ ID NO: 5842 - RNA, 19 nt, artificial
  Chemically Synthesized
ggcauauaucuacguuaaa
